United States Patent Application Publication US 2026/0325630 A1, published October 22, 2026 (application 19/578,576).

The application's sequence listing, which the Patent Office published only in electronic form, follows.

SEQUENCE LISTING (5996 sequences)

SEQ ID NO: 1 - protein, 117 aa, synthetic construct
QVQLVESGGGLVKPGGSLRLSCAASGFTFSDSYMSWIRQAPGKGLEWVSYISNSGSYMYYADSVKGRFTISRDNAKNSLYLQMNNLRAEDTAVYYCARDKLGIGDYWGQGTLVTVSS

SEQ ID NO: 2 - protein, 107 aa, synthetic construct
DIQMTQSPSSLSASVGDRVTITCRASQGIRNDLGWFQQKPGKAPKRLIYAASRLQSGVPSRFSGSGSGTEFTLTISSLQPEDFATYCCLQHHTYPPTFGQGTKVEIK

SEQ ID NO: 3 - protein, 119 aa, synthetic construct
EVYLVESGGGLVQPGGSLRLSCEASGFTFSRYWMHWVRQVPGKGLVWVSRINIVGSTIDYADSVKGRFTISRDNAKNTLYLQMDSLTAEDTAVYYCAREGDRSDAFAIWGQGTMVTVSS

SEQ ID NO: 4 - protein, 107 aa, synthetic construct
SHELTQPLSVSVALGQSAMITCRGNNIGSQNVHWYHQKPGQAPVLVIYRNINRPSGIPERFSGSTSGTTATLTISRAQAGDEADYYCQVWDSSGSWVFGGGAKLTVL

SEQ ID NO: 5 - RNA, 1662 nt, Homo sapiens
  source 1..1662: mol_type = mRNA
cctttcccagatagcacgctccgccagtcccaagggtgcgcaaccggctgcactcccctcccgcgacccagggcccgggagcagcccccatgacccacacgcacgtctgcagcagccccgctcacgccccggcgagcctcaacccaggcgtcctgcccctgctctgaccccgggtggcccctacccctggcgacccctcacgcacacagcctctcccccacccccacccgcgcacgcacacatgcagataacagccccgacccccggccagagccgcagagtccctgggccaccccggccgctcgctgcgctgcgccgcaccgcgctgtcctcccggagccggaccggggccaccgcgcccgctctgctccgacaccgcgccccctggacagccgccctctcctccaggcccgtggggctggccctgcaccgccgagcttcccgggatgagggcccccggtgtggtcacccggcgcgccccaggtcgctgagggaccccggccaggcgcggagatgggggtgcacgaatgtcctgcctggctgtggcttctcctgtccctgctgtcgctccctctgggcctcccagtcctgggcgccccaccacgcctcatctgtgacagccgagtcctggagaggtacctcttggaggccaaggaggccgagaatatcacgacgggctgtgctgaacactgcagcttgaatgagaatatcactgtcccagacaccaaagttaatttctatgcctggaagaggatggaggtcgggcagcaggccgtagaagtctggcagggcctggccctgctgtcggaagctgtcctgcggggccaggccctgttggtcaactcttcccagccgtgggagcccctgcagctgcatgtggataaagccgtcagtggccttcgcagcctcaccactctgcttcgggctctgggagcccagaaggaagccatctcccctccagatgcggcctcagctgctccactccgaacaatcactgctgacactttccgcaaactcttccgagtctactccaatttcctccggggaaagctgaagctgtacacaggggaggcctgcaggacaggggacagatgaccaggtgtgtccacctgggcatatccaccacctccctcaccaacattgcttgtgccacaccctcccccgccactcctgaaccccgtcgaggggctctcagctcagcgccagcctgtcccatggacactccagtgccagcaatgacatctcaggggccagaggaactgtccagagagcaactctgagatctaaggatgtcacagggccaacttgagggcccagagcaggaagcattcagagagcagctttaaactcagggacagagccatgctgggaagacgcctgagctcactcggcaccctgcaaaatttgatgccaggacacgctttggaggcgatttacctgttttcgcacctaccatcagggacaggatgacctggataacttaggtggcaagctgtgacttctccaggtctcacgggcatgggcactcccttggtggcaagagcccccttgacaccggggtggtgggaaccatgaagacaggatgggggctggcctctggctctcatggggtccaagttttgtgtattcttcaacctcattgacaagaactgaaaccaccaa

SEQ ID NO: 6 - RNA, 25 nt, synthetic construct
  source 1..25: mol_type = other RNA
cttgaatgagaatatcactgtccca

SEQ ID NO: 7 - RNA, 25 nt, synthetic construct
  source 1..25: mol_type = other RNA
gcagcttgaatgagaatatcactgt

SEQ ID NO: 8 - RNA, 25 nt, synthetic construct
  source 1..25: mol_type = other RNA
gcatgtggataaagccgtcagtggc

SEQ ID NO: 9 - RNA, 25 nt, synthetic construct
  source 1..25: mol_type = other RNA
ccgaacaatcactgctgacactttc

SEQ ID NO: 10 - RNA, 25 nt, synthetic construct
  source 1..25: mol_type = other RNA
ctttccgcaaactcttccgagtcta

SEQ ID NO: 11 - RNA, 25 nt, synthetic construct
  source 1..25: mol_type = other RNA
aaactcttccgagtctactccaatt

SEQ ID NO: 12 - RNA, 25 nt, synthetic construct
  source 1..25: mol_type = other RNA
gagagcaactctgagatctaaggat

SEQ ID NO: 13 - RNA, 25 nt, synthetic construct
  source 1..25: mol_type = other RNA
agagcaactctgagatctaaggatg

SEQ ID NO: 14 - RNA, 25 nt, synthetic construct
  source 1..25: mol_type = other RNA
gagcaactctgagatctaaggatgt

SEQ ID NO: 15 - RNA, 25 nt, synthetic construct
  source 1..25: mol_type = other RNA
caggaagcattcagagagcagcttt

SEQ ID NO: 16 - RNA, 25 nt, synthetic construct
  source 1..25: mol_type = other RNA
aggaagcattcagagagcagcttta

SEQ ID NO: 17 - RNA, 25 nt, synthetic construct
  source 1..25: mol_type = other RNA
gaagcattcagagagcagctttaaa

SEQ ID NO: 18 - RNA, 25 nt, synthetic construct
  source 1..25: mol_type = other RNA
gagagcagctttaaactcagggaca

SEQ ID NO: 19 - RNA, 25 nt, synthetic construct
  source 1..25: mol_type = other RNA
caggacacgctttggaggcgattta

SEQ ID NO: 20 - RNA, 25 nt, synthetic construct
  source 1..25: mol_type = other RNA
catcagggacaggatgacctggata

SEQ ID NO: 21 - RNA, 25 nt, synthetic construct
  source 1..25: mol_type = other RNA
gggacaggatgacctggataactta

SEQ ID NO: 22 - RNA, 2411 nt, Homo sapiens
  source 1..2411: mol_type = mRNA
ggtcagctgcgtccggcggaggcagctgctgacccagctgtggactgtgccgggggcgggggacggaggggcaggagccctgggctccccgtggcgggggctgtatcatggaccacctcggggcgtccctctggccccaggtcggctccctttgtctcctgctcgctggggccgcctgggcgcccccgcctaacctcccggaccccaagttcgagagcaaagcggccttgctggcggcccgggggcccgaagagcttctgtgcttcaccgagcggttggaggacttggtgtgtttctgggaggaagcggcgagcgctggggtgggcccgggcaactacagcttctcctaccagctcgaggatgagccatggaagctgtgtcgcctgcaccaggctcccacggctcgtggtgcggtgcgcttctggtgttcgctgcctacagccgacacgtcgagcttcgtgcccctagagttgcgcgtcacagcagcctccggcgctccgcgatatcaccgtgtcatccacatcaatgaagtagtgctcctagacgcccccgtggggctggtggcgcggttggctgacgagagcggccacgtagtgttgcgctggctcccgccgcctgagacacccatgacgtctcacatccgctacgaggtggacgtctcggccggcaacggcgcagggagcgtacagagggtggagatcctggagggccgcaccgagtgtgtgctgagcaacctgcggggccggacgcgctacaccttcgccgtccgcgcgcgtatggctgagccgagcttcggcggcttctggagcgcctggtcggagcctgtgtcgctgctgacgcctagcgacctggaccccctcatcctgacgctctccctcatcctcgtggtcatcctggtgctgctgaccgtgctcgcgctgctctcccaccgccgggctctgaagcagaagatctggcctggcatcccgagcccagagagcgagtttgaaggcctcttcaccacccacaagggtaacttccagctgtggctgtaccagaatgatggctgcctgtggtggagcccctgcacccccttcacggaggacccacctgcttccctggaagtcctctcagagcgctgctgggggacgatgcaggcagtggagccggggacagatgatgagggccccctgctggagccagtgggcagtgagcatgcccaggatacctatctggtgctggacaaatggttgctgccccggaacccgcccagtgaggacctcccagggcctggtggcagtgtggacatagtggccatggatgaaggctcagaagcatcctcctgctcatctgctttggcctcgaagcccagcccagagggagcctctgctgccagctttgagtacactatcctggaccccagctcccagctcttgcgtccatggacactgtgccctgagctgccccctaccccaccccacctaaagtacctgtaccttgtggtatctgactctggcatctcaactgactacagctcaggggactcccagggagcccaagggggcttatccgatggcccctactccaacccttatgagaacagccttatcccagccgctgagcctctgccccccagctatgtggcttgctcttaggacaccaggctgcagatgatcagggatccaatatgactcagagaaccagtgcagactcaagacttatggaacagggatggcgaggcctctctcaggagcaggggcattgctgattttgtctgcccaatccatcctgctcaggaaaccacaaccttgcagtatttttaaatatgtatagtttttttttgtatctatatatatatatacacatatgtatgtaagtttttctaccatgatttctacaaacaccctttaagtcccatcttcccctgggcataggccatagggatagaagttaaagttcttgagcttattcagaagctggatctgcaatctgaatgctactcataacataacaaaatagtatgttaaacagctcttaaatcttactggcttaccacattaaatgatttctctctcctaactcagctcaaatgggcagccatccatgggatgagtcagaggttcagactcttccagtctgtagctctaccttctcttagggtacttagatggatcccctgttctacaaactgccagtcagcaagggaagaaaaagggcagcaatgaccctcaatgggccatttgagggatctggcctggaaatgggcttcctctcttcttctcacacctcactggctggaaacagtcacatgaccccagtcacatgaaaggccaggaaacttagtttagctgtacacccaggaagggcaaagctgtttaagggccactagctagtctctgccactaataataataaaagtaattctgaatcag

SEQ ID NO: 23 - RNA, 25 nt, synthetic construct
  source 1..25: mol_type = other RNA
caccgagcggttggaggacttggtg

SEQ ID NO: 24 - RNA, 25 nt, synthetic construct
  source 1..25: mol_type = other RNA
cgaggatgagccatggaagctgtgt

SEQ ID NO: 25 - RNA, 25 nt, synthetic construct
  source 1..25: mol_type = other RNA
atggaagctgtgtcgcctgcaccag

SEQ ID NO: 26 - RNA, 25 nt, synthetic construct
  source 1..25: mol_type = other RNA
caccaggctcccacggctcgtggtg

SEQ ID NO: 27 - RNA, 25 nt, synthetic construct
  source 1..25: mol_type = other RNA
atatcaccgtgtcatccacatcaat

SEQ ID NO: 28 - RNA, 25 nt, synthetic construct
  source 1..25: mol_type = other RNA
acatcaatgaagtagtgctcctaga

SEQ ID NO: 29 - RNA, 25 nt, synthetic construct
  source 1..25: mol_type = other RNA
atcaatgaagtagtgctcctagacg

SEQ ID NO: 30 - RNA, 25 nt, synthetic construct
  source 1..25: mol_type = other RNA
cgtggggctggtggcgcggttggct

SEQ ID NO: 31 - RNA, 25 nt, synthetic construct
  source 1..25: mol_type = other RNA
ctggagggccgcaccgagtgtgtgc

SEQ ID NO: 32 - RNA, 25 nt, synthetic construct
  source 1..25: mol_type = other RNA
accacccacaagggtaacttccagc

SEQ ID NO: 33 - RNA, 25 nt, synthetic construct
  source 1..25: mol_type = other RNA
cagaatgatggctgcctgtggtgga

SEQ ID NO: 34 - RNA, 25 nt, synthetic construct
  source 1..25: mol_type = other RNA
agcgctgctgggggacgatgcaggc

SEQ ID NO: 35 - RNA, 25 nt, synthetic construct
  source 1..25: mol_type = other RNA
gagggagcctctgctgccagctttg

SEQ ID NO: 36 - RNA, 25 nt, synthetic construct
  source 1..25: mol_type = other RNA
cctgtaccttgtggtatctgactct

SEQ ID NO: 37 - RNA, 25 nt, synthetic construct
  source 1..25: mol_type = other RNA
atctgactctggcatctcaactgac

SEQ ID NO: 38 - RNA, 25 nt, synthetic construct
  source 1..25: mol_type = other RNA
tctggcatctcaactgactacagct

SEQ ID NO: 39 - RNA, 25 nt, synthetic construct
  source 1..25: mol_type = other RNA
caggggactcccagggagcccaagg

SEQ ID NO: 40 - RNA, 25 nt, synthetic construct
  source 1..25: mol_type = other RNA
agcctctgccccccagctatgtggc

SEQ ID NO: 41 - RNA, 25 nt, synthetic construct
  source 1..25: mol_type = other RNA
ctcaagacttatggaacagggatgg

SEQ ID NO: 42 - RNA, 25 nt, synthetic construct
  source 1..25: mol_type = other RNA
cttactggcttaccacattaaatga

SEQ ID NO: 43 - RNA, 4853 nt, Homo sapiens
  source 1..4853: mol_type = mRNA
actctgcctagaggctccagaagaagactggtctctcccaccacacagaggcctggaggaggcagaggccaggagggagaggtcccaagagcctgtgaaatgggtctggcctggctcccagctgggcaggaacacaggacttcaggacactaaggaccctgtcatgcccatggccagcacccaccagtgctggtgcctgcctgtccagagctgaccagggagatggtgctggcccaggggctgctctccatggccctgctggccctgtgctgggagcgcagcctggcaggggcagaagaaaccatcccgctgcagaccctgcgctgctacaacgactacaccagccacatcacctgcaggtgggcagacacccaggatgcccagcggctcgtcaacgtgaccctcattcgccgggtgaatgaggacctcctggagccagtgtcctgtgacctcagtgatgacatgccctggtcagcctgcccccatccccgctgcgtgcccaggagatgtgtcattccctgccagagttttgtcgtcactgacgttgactacttctcattccaaccagacaggcctctgggcacccggctcaccgtcactctgacccagcatgtccagcctcctgagcccagggacctgcagatcagcaccgaccaggaccacttcctgctgacctggagtgtggcccttgggagtccccagagccactggttgtccccaggggatctggagtttgaggtggtctacaagcggcttcaggactcttgggaggacgcagccatcctcctctccaacacctcccaggccaccctggggccagagcacctcatgcccagcagcacctacgtggcccgagtacggacccgcctggccccaggttctcggctctcaggacgtcccagcaagtggagcccagaggtttgctgggactcccagccaggggatgaggcccagccccagaacctggagtgcttctttgacggggccgccgtgctcagctgctcctgggaggtgaggaaggaggtggccagctcggtctcctttggcctattctacaagcccagcccagatgcaggggaggaagagtgctccccagtgctgagggaggggctcggcagcctccacaccaggcaccactgccagattcccgtgcccgaccccgcgacccacggccaatacatcgtctctgttcagccaaggagggcagagaaacacataaagagctcagtgaacatccagatggcccctccatccctcaacgtgaccaaggatggagacagctacagcctgcgctgggaaacaatgaaaatgcgatacgaacacatagaccacacatttgagatccagtacaggaaagacacggccacgtggaaggacagcaagaccgagaccctccagaacgcccacagcatggccctgccagccctggagccctccaccaggtactgggccagggtgagggtcaggacctcccgcaccggctacaacgggatctggagcgagtggagtgaggcgcgctcctgggacaccgagtcggtgctgcctatgtgggtgctggccctcatcgtgatcttcctcaccatcgctgtgctcctggccctccgcttctgtggcatctacgggtacaggctgcgcagaaagtgggaggagaagatccccaaccccagcaagagccacctgttccagaacgggagcgcagagctttggcccccaggcagcatgtcggccttcactagcgggagtcccccacaccaggggccgtggggcagccgcttccctgagctggagggggtgttccctgtaggattcggggacagcgaggtgtcacctctcaccatagaggaccccaagcatgtctgtgatccaccatctgggcctgacacgactccagctgcctcagatctacccacagagcagccccccagcccccagccaggcccgcctgccgcctcccacacacctgagaaacaggcttccagctttgacttcaatgggccctacctggggccgccccacagccgctccctacctgacatcctgggccagccggagcccccacaggagggtgggagccagaagtccccacctccagggtccctggagtacctgtgtctgcctgctggggggcaggtgcaactggtccctctggcccaggcgatgggaccaggacaggccgtggaagtggagagaaggccgagccagggggctgcagggagtccctccctggagtccgggggaggccctgcccctcctgctcttgggccaagggtgggaggacaggaccaaaaggacagccctgtggctatacccatgagctctggggacactgaggaccctggagtggcctctggttatgtctcctctgcagacctggtattcaccccaaactcaggggcctcgtctgtctccctagttccctctctgggcctcccctcagaccagacccccagcttatgtcctgggctggccagtggaccccctggagccccaggccctgtgaagtcagggtttgagggctatgtggagctccctccaattgagggccggtcccccaggtcaccaaggaacaatcctgtcccccctgaggccaaaagccctgtcctgaacccaggggaacgcccggcagatgtgtccccaacatccccacagcccgagggcctccttgtcctgcagcaagtgggcgactattgcttcctccccggcctggggcccggccctctctcgctccggagtaaaccttcttccccgggacccggtcctgagatcaagaacctagaccaggcttttcaagtcaagaagcccccaggccaggctgtgccccaggtgcccgtcattcagctcttcaaagccctgaagcagcaggactacctgtctctgcccccttgggaggtcaacaagcctggggaggtgtgttgagacccccaggcctagacaggcaaggggatggagagggcttgccttccctcccgcctgaccttcctcagtcatttctgcaaagccaaggggcagcctcctgtcaaggtagctagaggcctgggaaaggagatagccttgctccggcccccttgaccttcagcaaatcacttctctccctgcgctcacacagacacacacacacacacgtacatgcacacatttttcctgtcaggttaacttatttgtaggttctgcattattagaactttctagatatactcattccatctccccctcatttttttaatcaggtttccttgcttttgccatttttcttccttcttttttcactgatttattatgagagtggggctgaggtctgagctgagccttatcagactgagatgcggctggttgtgttgaggacttgtgtgggctgcctgtccccggcagtcgctgatgcacatgacatgattctcatctgggtgcagaggtgggaggcaccaggtgggcacccgtgggggttagggcttggaagagtggcacaggactgggcacgctcagtgaggctcagggaattcagactagcctcgattgtcactccgagaaatgggcatggtattgggggtcgggggggcggtgcaagggacgcacatgagagactgtttgggagcttctggggagccctgctagttgtctcagtgatgtctgtgggacctccagtcccttgagaccccacgtcatgtagagaagttaacggcccaagtggtgggcaggctggcgggacctggggaacatcaggagaggagtccagagcccacgtctactgcggaaaagtcaggggaaactgccaaacaaaggaaaatgccccaaaggcatatatgctttagggcctttggtccaaatggcccgggtggccactcttccagatagaccaggcaactctccctcccaccggccacagatgaggggctgctgatctatgcctgggcctgcaccagggattatggttcttttaaatctttgcctttcagatacaggaaaaataatggcattaaattgctttaatttgcattattttagttatccagtttgcacatatttttataggtatcttaggcatcgattggtattttttaactgggccaagcccattaaggtctttcttctgttgggtgctatcattttctgattaagtctttttgactattgacatacagtctttcacagatggtggagtgtttttcccccaaatctgttgtttgtcttataatgttgtatatgaggttttatggtgtatgaatatgaatgcttctgtaatgtcaaacagatccctagtaaactccttcttcacttttactgtcagatttacaaaggtcctcccattgcaaagcagtgtttgtcctaatttatatattgtttttctagttcattttgtgtttccaacttttcatgtaaaattttaattatttttgaatgtgtggatgtgagactgaggtgccttttggtactgaaattctttttccatgtacctgaagtgttacttttgtgatataggaaatccttgtatatatactttattggtccctaggcttcctattttgttaccttgctttctctatggcatccaccattttgattgttctacttttatgatatgttttcataagtggttaagcaagtattctcgttacttttgctcttaaatccctattcattacagcaatgttggtggtcaaagaaaatgataaacaacttgaatgttcaatggtcctgaaatacataacaacattttagtacattgtaaagtagaatcctctgttcataatgaacaagatgaaccaatgtggattagaaagaagtccgagatattaattccaaaatatccagacattgttaaagggaaaaaattgcaataaaatatttgtaacataaaa

SEQ ID NO: 44 - RNA, 25 nt, synthetic construct
  source 1..25: mol_type = other RNA
ggctcgtcaacgtgaccctcattcg

SEQ ID NO: 45 - RNA, 25 nt, synthetic construct
  source 1..25: mol_type = other RNA
cctggagccagtgtcctgtgacctc

SEQ ID NO: 46 - RNA, 25 nt, synthetic construct
  source 1..25: mol_type = other RNA
gcccaggagatgtgtcattccctgc

SEQ ID NO: 47 - RNA, 25 nt, synthetic construct
  source 1..25: mol_type = other RNA
gtcgtcactgacgttgactacttct

SEQ ID NO: 48 - RNA, 25 nt, synthetic construct
  source 1..25: mol_type = other RNA
gacgttgactacttctcattccaac

SEQ ID NO: 49 - RNA, 25 nt, synthetic construct
  source 1..25: mol_type = other RNA
ctccacaccaggcaccactgccaga

SEQ ID NO: 50 - RNA, 25 nt, synthetic construct
  source 1..25: mol_type = other RNA
acccacggccaatacatcgtctctg

SEQ ID NO: 51 - RNA, 25 nt, synthetic construct
  source 1..25: mol_type = other RNA
atggcccctccatccctcaacgtga

SEQ ID NO: 52 - RNA, 25 nt, synthetic construct
  source 1..25: mol_type = other RNA
acgtgaccaaggatggagacagcta

SEQ ID NO: 53 - RNA, 25 nt, synthetic construct
  source 1..25: mol_type = other RNA
gtgaccaaggatggagacagctaca

SEQ ID NO: 54 - RNA, 25 nt, synthetic construct
  source 1..25: mol_type = other RNA
aaggatggagacagctacagcctgc

SEQ ID NO: 55 - RNA, 25 nt, synthetic construct
  source 1..25: mol_type = other RNA
atgcgatacgaacacatagaccaca

SEQ ID NO: 56 - RNA, 25 nt, synthetic construct
  source 1..25: mol_type = other RNA
cgatacgaacacatagaccacacat

SEQ ID NO: 57 - RNA, 25 nt, synthetic construct
  source 1..25: mol_type = other RNA
gtgggtgctggccctcatcgtgatc

SEQ ID NO: 58 - RNA, 25 nt, synthetic construct
  source 1..25: mol_type = other RNA
agatccccaaccccagcaagagcca

SEQ ID NO: 59 - RNA, 25 nt, synthetic construct
  source 1..25: mol_type = other RNA
cggggacagcgaggtgtcacctctc

SEQ ID NO: 60 - RNA, 25 nt, synthetic construct
  source 1..25: mol_type = other RNA
ctacccacagagcagccccccagcc

SEQ ID NO: 61 - RNA, 25 nt, synthetic construct
  source 1..25: mol_type = other RNA
aaaggacagccctgtggctataccc

SEQ ID NO: 62 - RNA, 25 nt, synthetic construct
  source 1..25: mol_type = other RNA
cctgagatcaagaacctagaccagg

SEQ ID NO: 63 - RNA, 25 nt, synthetic construct
  source 1..25: mol_type = other RNA
tcaaagccctgaagcagcaggacta

SEQ ID NO: 64 - RNA, 25 nt, synthetic construct
  source 1..25: mol_type = other RNA
gtcaaagaaaatgataaacaacttg

SEQ ID NO: 65 - protein, 250 aa, Homo sapiens
MDHLGASLWPQVGSLCLLLAGAAWAPPPNLPDPKFESKAALLAARGPEELLCFTERLEDLVCFWEEAASAGVGPGNYSFSYQLEDEPWKLCRLHQAPTARGAVRFWCSLPTADTSSFVPLELRVTAASGAPRYHRVIHINEVVLLDAPVGLVARLADESGHVVLRWLPPPETPMTSHIRYEVDVSAGNGAGSVQRVEILEGRTECVLSNLRGRTRYTFAVRARMAEPSFGGFWSAWSEPVSLLTPSDLDP

SEQ ID NO: 66 - RNA, 750 nt, Homo sapiens
  source 1..750: mol_type = mRNA
atggaccacctcggggcgtccctctggccccaggtcggctccctttgtctcctgctcgctggggccgcctgggctccgccccctaatcttccagatccaaaatttgaatccaaggctgcgctgttggctgcaagaggccctgaggaactcctctgttttactgaacgcttagaagatctcgtttgcttttgggaagaggctgcttctgccggcgttggacccggtaattattcattttcttatcaattagaagacgaaccctggaaattgtgcagacttcatcaagcgcctactgcccgaggcgccgtccggttttggtgctcactccccactgcggatacatcctcttttgtaccattggaactgagggtaaccgccgcatcaggggcaccccgctaccatagagtaattcatataaacgaggttgtcctgttagatgctcctgtaggacttgtcgcccgcctggcggatgaatccgggcatgtggttcttaggtggctgcccccaccagaaaccccaatgaccagtcatattcgatatgaagttgatgtaagcgcggggaatggggccggttctgtgcaaagagtagaaatacttgaagggcgaactgaatgcgtcctttccaatctcaggggtaggactagatatacttttgctgtgagggccaggatggcagaaccatcatttggtggattttggtccgcatggtcagaaccagtttctctcctgacaccatccgatttagatcct

SEQ ID NO: 67 - protein, 443 aa, Homo sapiens
MVLAQGLLSMALLALCWERSLAGAEETIPLQTLRCYNDYTSHITCRWADTQDAQRLVNVTLIRRVNEDLLEPVSCDLSDDMPWSACPHPRCVPRRCVIPCQSFVVTDVDYFSFQPDRPLGTRLTVTLTQHVQPPEPRDLQISTDQDHFLLTWSVALGSPQSHWLSPGDLEFEVVYKRLQDSWEDAAILLSNTSQATLGPEHLMPSSTYVARVRTRLAPGSRLSGRPSKWSPEVCWDSQPGDEAQPQNLECFFDGAAVLSCSWEVRKEVASSVSFGLFYKPSPDAGEEECSPVLREGLGSLHTRHHCQIPVPDPATHGQYIVSVQPRRAEKHIKSSVNIQMAPPSLNVTKDGDSYSLRWETMKMRYEHIDHTFEIQYRKDTATWKDSKTETLQNAHSMALPALEPSTRYWARVRVRTSRTGYNGIWSEWSEARSWDTESVLPMW

SEQ ID NO: 68 - RNA, 1329 nt, Homo sapiens
  source 1..1329: mol_type = mRNA
atggtgctggcccaggggctgctctccatggccctgctggccctgtgctgggagcgcagcctggcaggggcagaagaaaccatcccgctgcagaccctgcgctgctacaacgactacaccagccacatcacctgcaggtgggcagacacccaggatgcccagcggctcgtcaacgtgaccctcattcgccgggtgaatgaggacctcctggagccagtgtcctgtgacctcagtgatgacatgccctggtcagcctgcccccatccccgctgcgtgcccaggagatgtgtcattccctgccagagttttgtcgtcactgacgttgactacttctcattccaaccagacaggcctctgggcacccggctcaccgtcactctgacccagcatgtccagcctcctgagcccagggacctgcagatcagcaccgaccaggaccacttcctgctgacctggagtgtggcccttgggagtccccagagccactggttgtccccaggggatctggagtttgaggtggtctacaagcggcttcaggactcttgggaggacgcagccatcctcctctccaacacctcccaggccaccctggggccagagcacctcatgcccagcagcacctacgtggcccgagtacggacccgcctggccccaggttctcggctctcaggacgtcccagcaagtggagcccagaggtttgctgggactcccagccaggggatgaggcccagccccagaacctggagtgcttctttgacggggccgccgtgctcagctgctcctgggaggtgaggaaggaggtggccagctcggtctcctttggcctattctacaagcccagcccagatgcaggggaggaagagtgctccccagtgctgagggaggggctcggcagcctccacaccaggcaccactgccagattcccgtgcccgaccccgcgacccacggccaatacatcgtctctgttcagccaaggagggcagagaaacacataaagagctcagtgaacatccagatggcccctccatccctcaacgtgaccaaggatggagacagctacagcctgcgctgggaaacaatgaaaatgcgatacgaacacatagaccacacatttgagatccagtacaggaaagacacggccacgtggaaggacagcaagaccgagaccctccagaacgcccacagcatggccctgccagccctggagccctccaccaggtactgggccagggtgagggtcaggacctcccgcaccggctacaacgggatctggagcgagtggagtgaggcgcgctcctgggacaccgagtcggtgctgcctatgtgg

SEQ ID NO: 69 - protein, 221 aa, Homo sapiens
MAWMMLLLGLLAYGSGVDSEAQPQNLECFFDGAAVLSCSWEVRKEVASSVSFGLFYKPSPDAGEEECSPVLREGLGSLHTRHHCQIPVPDPATHGQYIVSVQPRRAEKHIKSSVNIQMAPPSLNVTKDGDSYSLRWETMKMRYEHIDHTFEIQYRKDTATWKDSKTETLQNAHSMALPALEPSTRYWARVRVRTSRTGYNGIWSEWSEARSWDTESVLPMW

SEQ ID NO: 70 - RNA, 663 nt, Homo sapiens
  source 1..663: mol_type = mRNA
atggcctggatgatgcttctcctcggactccttgcttatggatcaggagtcgactctgaggcccagccccagaacctggagtgcttctttgacggggccgccgtgctcagctgctcctgggaggtgaggaaggaggtggccagctcggtctcctttggcctattctacaagcccagcccagatgcaggggaggaagagtgctccccagtgctgagggaggggctcggcagcctccacaccaggcaccactgccagattcccgtgcccgaccccgcgacccacggccaatacatcgtctctgttcagccaaggagggcagagaaacacataaagagctcagtgaacatccagatggcccctccatccctcaacgtgaccaaggatggagacagctacagcctgcgctgggaaacaatgaaaatgcgatacgaacacatagaccacacatttgagatccagtacaggaaagacacggccacgtggaaggacagcaagaccgagaccctccagaacgcccacagcatggccctgccagccctggagccctccaccaggtactgggccagggtgagggtcaggacctcccgcaccggctacaacgggatctggagcgagtggagtgaggcgcgctcctgggacaccgagtcggtgctgcctatgtgg

SEQ ID NO: 71 - protein, 250 aa, Homo sapiens
MDHLGASLWPQVGSLCLLLAGAAWAPPPNLPDPKFESKAALLAARGPEELLCFTERLEDLVCFWEEAASAGVGPGNYSFSYQLEDEPWKLCRLHQAPTARGAVRFWCSLPTADTSSAVPLELRVTAASGAPRYHRVIHINEVVLLDAPVGLVARLADESGHVVLRWLPPPETPMTSHIRYEVDVSAGNGAGSVQRVEILEGRTECVLSNLRGRTRYTFAVRARMAEPSFGGFWSAWSEPVSLLTPSDLDP

SEQ ID NO: 72 - RNA, 750 nt, Homo sapiens
  source 1..750: mol_type = mRNA
atggaccacctcggggcgtccctctggccccaggtcggctccctttgtctcctgctcgctggggccgcctgggctccgccccctaatcttccagatccaaaatttgaatccaaggctgcgctgttggctgcaagaggccctgaggaactcctctgttttactgaacgcttagaagatctcgtttgcttttgggaagaggctgcttctgccggcgttggacccggtaattattcattttcttatcaattagaagacgaaccctggaaattgtgcagacttcatcaagcgcctactgcccgaggcgccgtccggttttggtgctcactccccactgcggatacatcctctgcagtaccattggaactgagggtaaccgccgcatcaggggcaccccgctaccatagagtaattcatataaacgaggttgtcctgttagatgctcctgtaggacttgtcgcccgcctggcggatgaatccgggcatgtggttcttaggtggctgcccccaccagaaaccccaatgaccagtcatattcgatatgaagttgatgtaagcgcggggaatggggccggttctgtgcaaagagtagaaatacttgaagggcgaactgaatgcgtcctttccaatctcaggggtaggactagatatacttttgctgtgagggccaggatggcagaaccatcatttggtggattttggtccgcatggtcagaaccagtttctctcctgacaccatccgatttagatcct

SEQ ID NO: 73 - protein, 20 aa, synthetic construct
  VARIANT 3..20: note = GS repeats may be deleted
GSGSGSGSGSGSGSGSGSGS

SEQ ID NO: 74 - protein, 30 aa, synthetic construct
  VARIANT 4..30: note = GGS repeats may be deleted
GGSGGSGGSGGSGGSGGSGGSGGSGGSGGS

SEQ ID NO: 75 - protein, 40 aa, synthetic construct
  VARIANT 5..40: note = GGGS repeats may be deleted
GGGSGGGSGGGSGGGSGGGSGGGSGGGSGGGSGGGSGGGS

SEQ ID NO: 76 - protein, 40 aa, synthetic construct
  VARIANT 5..40: note = GGSG repeats may be deleted
GGSGGGSGGGSGGGSGGGSGGGSGGGSGGGSGGGSGGGSG

SEQ ID NO: 77 - protein, 50 aa, synthetic construct
  VARIANT 6..50: note = GGSGG repeats may be deleted
GGSGGGGSGGGGSGGGGSGGGGSGGGGSGGGGSGGGGSGGGGSGGGGSGG

SEQ ID NO: 78 - protein, 50 aa, synthetic construct
  VARIANT 6..50: note = GGGGS repeats may be deleted
GGGGSGGGGSGGGGSGGGGSGGGGSGGGGSGGGGSGGGGSGGGGSGGGGS

SEQ ID NO: 79 - protein, 15 aa, synthetic construct
GGGGSGGGGSGGGGS

SEQ ID NO: 80 - protein, 20 aa, synthetic construct
GGGGSGGGGSGGGGSGGGGS

SEQ ID NO: 81 - RNA, 25 nt, synthetic construct
  source 1..25: mol_type = other RNA
caccgcctcgagctccctctgagcc

SEQ ID NO: 82 - RNA, 25 nt, synthetic construct
  source 1..25: mol_type = other RNA
aaacggctcagagggagctcgaggc

SEQ ID NO: 83 - RNA, 25 nt, synthetic construct
  source 1..25: mol_type = other RNA
caccggttcggttaccgtcctgcga

SEQ ID NO: 84 - RNA, 25 nt, synthetic construct
  source 1..25: mol_type = other RNA
aaactcgcaggacggtaaccgaacc

SEQ ID NO: 85 - RNA, 25 nt, synthetic construct
  source 1..25: mol_type = other RNA
caccggctaacgatctctttgatga

SEQ ID NO: 86 - RNA, 25 nt, synthetic construct
  source 1..25: mol_type = other RNA
aaactcatcaaagagatcgttagcc

SEQ ID NO: 87 - RNA, 24 nt, synthetic construct
  source 1..24: mol_type = other RNA
caccgcgacagtcgagttctggag

SEQ ID NO: 88 - RNA, 24 nt, synthetic construct
  source 1..24: mol_type = other RNA
aaacctccagaactcgactgtcgc

SEQ ID NO: 89 - RNA, 24 nt, synthetic construct
  source 1..24: mol_type = other RNA
cacctgaggcgtgggggagcacag

SEQ ID NO: 90 - RNA, 24 nt, synthetic construct
  source 1..24: mol_type = other RNA
aaacctgtgctcccccacgcctca

SEQ ID NO: 91 - RNA, 24 nt, synthetic construct
  source 1..24: mol_type = other RNA
cacccaaggaggcagaaaatgtca

SEQ ID NO: 92 - RNA, 24 nt, synthetic construct
  source 1..24: mol_type = other RNA
aaactgacattttctgcctccttg

SEQ ID NO: 93 - DNA, 20 bp, synthetic construct
  source 1..20: mol_type = other DNA
acatcgacctcaccaagagg

SEQ ID NO: 94 - DNA, 20 bp, synthetic construct
  source 1..20: mol_type = other DNA
tcccatccttcacatccttc

SEQ ID NO: 95 - DNA, 20 bp, synthetic construct
  source 1..20: mol_type = other DNA
gccaacggcatggatctcaa

SEQ ID NO: 96 - DNA, 20 bp, synthetic construct
  source 1..20: mol_type = other DNA
atagcaaatcggctgacggt

SEQ ID NO: 97 - DNA, 20 bp, synthetic construct
  source 1..20: mol_type = other DNA
gccaccttttgacagtgatg

SEQ ID NO: 98 - DNA, 20 bp, synthetic construct
  source 1..20: mol_type = other DNA
atgtgctgctgcgagatttg

SEQ ID NO: 99 - DNA, 22 bp, synthetic construct
  source 1..22: mol_type = other DNA
ccgtgtaaatgagacagaggac

SEQ ID NO: 100 - DNA, 20 bp, synthetic construct
  source 1..20: mol_type = other DNA
gtagggagtgctggaatcgc

SEQ ID NO: 101 - DNA, 20 bp, synthetic construct
  source 1..20: mol_type = other DNA
gccaccactgcttacttcct

SEQ ID NO: 102 - DNA, 21 bp, synthetic construct
  source 1..21: mol_type = other DNA
cacaggtttggcagatttcgg

SEQ ID NO: 103 - DNA, 20 bp, synthetic construct
  source 1..20: mol_type = other DNA
gacgccgagaactggaacag

SEQ ID NO: 104 - DNA, 21 bp, synthetic construct
  source 1..21: mol_type = other DNA
gtcaccgtaggctcaactctc

SEQ ID NO: 105 - DNA, 20 bp, synthetic construct
  source 1..20: mol_type = other DNA
gcttgaacagcccaatgtcg

SEQ ID NO: 106 - DNA, 20 bp, synthetic construct
  source 1..20: mol_type = other DNA
ccagcgcactttgatcttgg

SEQ ID NO: 107 - DNA, 21 bp, synthetic construct
  source 1..21: mol_type = other DNA
gcgtagtctgctcacgataca

SEQ ID NO: 108 - DNA, 22 bp, synthetic construct
  source 1..22: mol_type = other DNA
agcatcttccatgtcccaatga

SEQ ID NO: 109 - DNA, 20 bp, synthetic construct
  source 1..20: mol_type = other DNA
gccaccaaggaggtacacat

SEQ ID NO: 110 - DNA, 20 bp, synthetic construct
  source 1..20: mol_type = other DNA
aggaagccatcaccagctta

SEQ ID NO: 111 - DNA, 22 bp, synthetic construct
  source 1..22: mol_type = other DNA
accccaagtttgagagcaaagc

SEQ ID NO: 112 - DNA, 22 bp, synthetic construct
  source 1..22: mol_type = other DNA
cctcccagaaacacaccaagtc

SEQ ID NO: 113 - DNA, 20 bp, synthetic construct
  source 1..20: mol_type = other DNA
acgatgggatctggagcaag

SEQ ID NO: 114 - DNA, 20 bp, synthetic construct
  source 1..20: mol_type = other DNA
acacagccaaagcgaaggat

SEQ ID NO: 115 - DNA, 22 bp, synthetic construct
  source 1..22: mol_type = other DNA
tactgtttgcagtctctcaagc

SEQ ID NO: 116 - DNA, 20 bp, synthetic construct
  source 1..20: mol_type = other DNA
cgtcctcaccttcgcgttta

SEQ ID NO: 117 - DNA, 21 bp, synthetic construct
  source 1..21: mol_type = other DNA
cctgtcccagttagggtttga

SEQ ID NO: 118 - DNA, 20 bp, synthetic construct
  source 1..20: mol_type = other DNA
ccaacagctacgaggtctcc

SEQ ID NO: 119 - DNA, 19 bp, synthetic construct
  source 1..19: mol_type = other DNA
cctgggaggcatctgcatt

SEQ ID NO: 120 - DNA, 21 bp, synthetic construct
  source 1..21: mol_type = other DNA
gcttcacaccgatcaccttgg

SEQ ID NO: 121 - DNA, 22 bp, synthetic construct
  source 1..22: mol_type = other DNA
atggatgggtccttactgtctg

SEQ ID NO: 122 - DNA, 20 bp, synthetic construct
  source 1..20: mol_type = other DNA
ccagtccctttggattgtga

SEQ ID NO: 123 - DNA, 20 bp, synthetic construct
  source 1..20: mol_type = other DNA
gccatcacccagcatcagag

SEQ ID NO: 124 - DNA, 20 bp, synthetic construct
  source 1..20: mol_type = other DNA
ggtgggcgtagaggctaagt

SEQ ID NO: 125 - DNA, 21 bp, synthetic construct
  source 1..21: mol_type = other DNA
cgggactacaccgagatgaac

SEQ ID NO: 126 - DNA, 22 bp, synthetic construct
  source 1..22: mol_type = other DNA
tcattcttgccattctcctggt

SEQ ID NO: 127 - DNA, 20 bp, synthetic construct
  source 1..20: mol_type = other DNA
tacaggggtttcgtgtgcat

SEQ ID NO: 128 - DNA, 20 bp, synthetic construct
  source 1..20: mol_type = other DNA
gggaaggccaggattcgtaa

SEQ ID NO: 129 - DNA, 23 bp, synthetic construct
  source 1..23: mol_type = other DNA
atgtttagcaagatcgcagtcac

SEQ ID NO: 130 - DNA, 20 bp, synthetic construct
  source 1..20: mol_type = other DNA
tccgtctgggtccactaggt

SEQ ID NO: 131 - DNA, 21 bp, synthetic construct
  source 1..21: mol_type = other DNA
ggttccacgtccatcagtatg

SEQ ID NO: 132 - DNA, 20 bp, synthetic construct
  source 1..20: mol_type = other DNA
ggtctccaacatgcctctct

SEQ ID NO: 133 - DNA, 21 bp, synthetic construct
  source 1..21: mol_type = other DNA
gctggcttggcttcaataagg

SEQ ID NO: 134 - DNA, 20 bp, synthetic construct
  source 1..20: mol_type = other DNA
gtgctcccacacgtcaatcc

SEQ ID NO: 135 - DNA, 20 bp, synthetic construct
  source 1..20: mol_type = other DNA
gcttcgacctagcagacagg

SEQ ID NO: 136 - DNA, 20 bp, synthetic construct
  source 1..20: mol_type = other DNA
gtggctgatggttgtaccct

SEQ ID NO: 137 - DNA, 20 bp, synthetic construct
  source 1..20: mol_type = other DNA
tgccgttcgattctccacag

SEQ ID NO: 138 - DNA, 21 bp, synthetic construct
  source 1..21: mol_type = other DNA
cccacaagatcccagttacca

SEQ ID NO: 139 - DNA, 24 bp, synthetic construct
  source 1..24: mol_type = other DNA
aagaacaatatcccgttccagatg

SEQ ID NO: 140 - DNA, 23 bp, synthetic construct
  source 1..23: mol_type = other DNA
gagcaagatagccacactctcac

SEQ ID NO: 141 - DNA, 19 bp, synthetic construct
  source 1..19: mol_type = other DNA
gctaccttgcccgaaagca

SEQ ID NO: 142 - DNA, 19 bp, synthetic construct
  source 1..19: mol_type = other DNA
gctccccagcaaagggttt

SEQ ID NO: 143 - DNA, 21 bp, synthetic construct
  source 1..21: mol_type = other DNA
aacggtacatctgtggggaag

SEQ ID NO: 144 - DNA, 21 bp, synthetic construct
  source 1..21: mol_type = other DNA
tccatgaggtagggcaggtta

SEQ ID NO: 145 - DNA, 20 bp, synthetic construct
  source 1..20: mol_type = other DNA
gggaagcgttggagaacgaa

SEQ ID NO: 146 - DNA, 21 bp, synthetic construct
  source 1..21: mol_type = other DNA
gtgtgggctagacactccttg

SEQ ID NO: 147 - protein, 122 aa, synthetic construct
QVQLQQSGPGLVKPSQTLSLTCAISGDSVSSNSAAWNWIRQSPSRGLEWLGRTYYRSKWYNDYAVSVKSRITINPDTSKNQFSLQLNSVTPEDTAVYYCARKGELLGAFDIWGQGTMVTVSS

SEQ ID NO: 148 - protein, 122 aa, synthetic construct
QVQLQQSGPGLVKPSQTLSLTCAISGDSVSSNSAAWNWIRQSPSRGLEWLGRTYYRSKWYNDYAGSVKSRIIIIPDTSKNQLSLQLKSVTPEDTAVYYCARKWELRDAFDIWGQGTMVTVSS

SEQ ID NO: 149 - protein, 120 aa, synthetic construct
EVQLVESGGSVVRPGGSLRLSCAASGFTFDDYGMSWVRQAPGKGLEWVSGINWNGGSTGYADSVKGRFTISRDNAKNSLYLQMNSLRAEDTALYYCAREDYGDPGWFDPWGQGTLVTVSS

SEQ ID NO: 150 - protein, 117 aa, synthetic construct
QLQLQESGPGLVKPSETLSLTCTVSGGSISSSSYYWGWIRQPPGKGLEWIGSIYYSGSTYYNPSLKSRVTISVDTSKNQFSLKLSSVTAADTAVYYCATLTGDGDYWGQGTLVTVSS

SEQ ID NO: 151 - protein, 120 aa, synthetic construct
EVQLVESGGGLVKPGGSLRLSCAASGFTFSSYSMNWVRQAPGKGLEWVSSISSSSSYIYYADSVKGRFTISRDNAKNSLYLQMNSLRAEDTAVYYCARDRSSSWYSFDYWGQGTLVTVSS

SEQ ID NO: 152 - protein, 121 aa, synthetic construct
EVQLVESGGGLVTPGGSLRLSCAASGFTFNNYSMNWVRQAPGKGLEWVSSISSSSSYIYYADSVKGRFTISRDNAKNSLYLPMISLRAEDTAVYYCARDGITGTTFYFDYWGQGTLVTVSS

SEQ ID NO: 153 - protein, 117 aa, synthetic construct
QVQLVESGGGVVQPGRSLRLSCAASGFTFSSYGMHWVRQAPGKGLEWVAVIWYDGSNKYYADSVKGRFTISRDNSKNTLYLQMNSLRAEDTAVYYCASIAAAGRDYWGQGTLVTVSS

SEQ ID NO: 154 - protein, 117 aa, synthetic construct
EVQLVESGGGLVQPGGSLRLSCAASGFTFSSYAMSWVRQAPGKGLEWVSAISGSGGSTYYADSVKGRFTISRDNSKNTLYLQMNSLRAEDTAVYYCAKAPELRFDYWGQGTLVTVSS

SEQ ID NO: 155 - protein, 117 aa, synthetic construct
QVQLVQSGAEVKKPGASVKVSCKASGYTFTSYGISWVRQAPGQGLEWMGWISPYNGNTNYAQNLQDRVTMITDTSTTTAYMELRSLRSDDTAVYYCARNHYYYMDVWGKGTTVTVSS

SEQ ID NO: 156 - protein, 120 aa, synthetic construct
QVQLQQWGAGLLKPSETLSLTCAVYGGSFSGYYWSWIRQPPGKGLEWIGEINHSGSTNYNPSLKSRVTISVDTSKNQFSLKLSSVTAADTAVYYCARGELGIGYWYFDLWGRGTLVTVSS

SEQ ID NO: 157 - protein, 122 aa, synthetic construct
QVQLVESGGGVVQPGRSLRLSCAASGFTFSSYGMHWVRQAPGKGLEWVAVIWYDGSNKYYADSVKGRFTISRDNSKNTLYLQMNSLRAEDTAVYYCARDTGITMVRGVFDYWGQGTLVTVSS

SEQ ID NO: 158 - protein, 122 aa, synthetic construct
EVQLVESGGDLVQPGGSLKLSCAASGFSFSGSTLHWVRQASGKGLEWIGHIRSKPNNYATLYGASVKGRFTISRDDSKNTAYLQMNSLKIEDTAVYYCNGVYGGSSYFFDYWGQGTLVTVSS

SEQ ID NO: 159 - protein, 117 aa, synthetic construct
QVQLVQSGAEVKKPGASVKVSCKASGYTFTGYYMHWVRQAPGQGLEWMGWINPNSGGTNYAQKFQGRVTMTRDTSISTAYMELSRLRSDDTAVYYCARDETTIFDYWGQGTLVTVSS

SEQ ID NO: 160 - protein, 129 aa, synthetic construct
QVQLVQSGAEVTKPGASVKVSCKASGYTFINYGISWVRQAPGQGLEWMGWISAYSGNRNYAQKFQDRVIMTTDTFTNTAYMELRSLRSDDTAVYYCARLGCNGTSCYTSWYYHFYMDVWGKGTTVTVSS

SEQ ID NO: 161 - protein, 123 aa, synthetic construct
QVQLVESGGGVVQPGRSLRLSCAASGFTFSSYGMHWVRQAPGKGLEWVAVIWYDGSNKYYADSVKGRFTISRDNSKNTLYLQMNSLRAEDTAVYYCARDEDYYGSGSYSFDYWGQGTLVTVSS

SEQ ID NO: 162 - protein, 118 aa, synthetic construct
QVQLQESGPGLVKPSGTLSLTCAVSGGSISSSNWWSWVRQPPGKGLEWIGEIYHSGSTNYNPSLKSRVTISVDKSKNQFSLKLSSVTAADTAVYYCARRGAARPFDYWGQGTLVTVSS

SEQ ID NO: 163 - protein, 120 aa, synthetic construct
QITLKESGPTLVKPTQTLTLTCTFSGFSLSTSGVGVGWIRQPPGKALEWLALIYWNDDKRYSPSLKSRLTITKDTSKNQVVLTMTNMDPVDTATYYCAHSNWNYGYFDLWGRGTLVTVSS

SEQ ID NO: 164 - protein, 119 aa, synthetic construct
EVQLVESGGGLVQPGGSLRLSCAASGFTFSSYAMSWVRQAPGKGLEWVSAISGSGGSTYYADSVKGRFTISRDNSKNTLYLQMNSLRAEDTAVYYCAKKDIVATHFDYWGQGTLVTVSS

SEQ ID NO: 165 - protein, 124 aa, synthetic construct
EVQLVESGGGLVKPGGSLRLSCAASGFTFSNAWMSWVRQAPGKGLEWVGRIKSKTDGGTTDYAAPVKGRFTISRDDSKNTLYLQMNSLKTEDTAVYYCTTADYDFWSGYYMDVWGKGTTVTVSS

SEQ ID NO: 166 - protein, 116 aa, synthetic construct
EVQLVESGGGLVQPGGSLRLSCAASGFTFSSYSMNWVRQAPGKGLEWVSYISSSSSTIYYADSVKGRFTISRDNAKNSLYLQMNSLRDEDTAVYYCARDRYNFDYWGQGTLVTVSS

SEQ ID NO: 167 - protein, 121 aa, synthetic construct
EVQLVESGGGVVRPGGSLRLSCAASGFTFDDYGMSWVRQAPGKGLEWVSGINWNGGSTGYADSVKGRFTISRDNAKNSLYLQMNSLRAEDTALYYCARGGDTAMVTVFDYWGQGTLVTVSS

SEQ ID NO: 168 - protein, 118 aa, synthetic construct
EVQLVQSGAEVKKPGESLKISCKGSGYSFTSYWIGWVRQMSGKGLEWMGIIYPSDSDTRYSPSFQGQVTISADKSISTAYLQWSSLKASDTAMYYCARQINWGAIDYWGQGTLVTVSS

SEQ ID NO: 169 - protein, 119 aa, synthetic construct
QVQLVQSGAEVKKPGASVKVSCKASGYTFTSYGISWVRQAPGQGLEWMGWISVYNGNTNYAQKLQGRVTMTTDTSTSTAYMELRSLRSDDTAVYYCARQITATRGFDYWGQGTLVTVSS

SEQ ID NO: 170 - protein, 122 aa, synthetic construct
QVQLQQSGPGLVKPSQTLSLTCAISGDSVSSNSAAWSWIRQSPSRGLEWLGRTYYRSKWYNDYAVSVKSRITINPDTSKNQFSLQLNSVTPEDTAVYYCARKWELRDTFDIWGQGTMVTVSS

SEQ ID NO: 171 - protein, 115 aa, synthetic construct
QVQLQQWGAGLLKPSETLSLTCAVYGGSFSGYYWSWIRQPPGKGLEWIGEINHSGSTNYNPSLKSRVTISVDTSKNQFSLKLSSVTAADTAVYYCASYGDFFDYWGQGTLVTVSS

SEQ ID NO: 172 - protein, 118 aa, synthetic construct
EVQLVESGGGLVKPGGSLRLSCAASGFTFSSYSMNWVRQAPGKGLEWVSSISSSSSYIYYADSVKGRFTISRDNAKNSLYLQMNSLRAEDTAVYYCARETELTVMDVWGKGTTVTVSS

SEQ ID NO: 173 - protein, 129 aa, synthetic construct
EVQLVESGGGLVKPGGSLRLSCAASGFTFSNAWMSWVRQAPGKGLEWVGRIKSKTDGGTTDYAAPVKGRFTISRDDSKNTLYLQMNSLKTEDTAVYYCTTDWEYYDFWSGYYSPYFDYWGQGTLVTVSS

SEQ ID NO: 174 - protein, 114 aa, synthetic construct
QVQLQESGPGLVKPSQTLSLTCTVSGGSISSGGYYWSWIRQHPGKGLEWIGYIYYIGITYYNPSLKSRVTISVDTSKNQFSLKLSSVTAADTAVYYCARAFDYWGQGTLVTVSS

SEQ ID NO: 175 - protein, 114 aa, synthetic construct
QVQLQESGPGLVKPSQTLSLTCTVSGGSISSGGYYWSWIRQHPGKGLEWIGYFYYSGSTYYNPSLKSRVSISVDTSKNQFSLRLSSVTVADTAVYYCVRAFDYWGQGTLVTASS

SEQ ID NO: 176 - protein, 114 aa, synthetic construct
EVQLVESGGGLVKPGGSLRLSCAASGFTFSNAWMSWVRQAPGKGLEWVGRIKSKTDGGTTDYAAPVKGRFTISRDDSKNTLYLQMNSLKTEDTAVYYCTTGANWGQGTLVTVSS

SEQ ID NO: 177 - protein, 114 aa, synthetic construct
QVQLVQSGAEVKKPGASVKVSCKASGYTFTSYDINWVRQATGQGLEWMGWMNPNSGNTGYAQKFQGRVTMTRNTSISTAYMELSSLRSEDTAVYYCARVAFDIWGQGTMVTVSS

SEQ ID NO: 178 - protein, 114 aa, synthetic construct
QVQLVQSGAEAKKPGASVKVSCMASGYTFTTYGISWVRQAPGQGLEWMGWISAYNGNTKYAQKLQGRVTMTTDTSTRTAYMELRSLRSDDTAVYYCARQIGDYWGQGTLVTVSS

SEQ ID NO: 179 - protein, 114 aa, synthetic construct
EVQLVESGGGLVQPGGSLRLSCAASGFTFSSYAMSWVRQAPGKGLEWVSAISGSGGSTYYADSVKGRFTISRDNSKNTLYLQMNSLRAEDTAVYYCHQTGEDYWGQGTLVTVSS

SEQ ID NO: 180 - protein, 115 aa, synthetic construct
EVQLVESGGGLVKPGGSLRLSCAASGFTFSNAWMSWVRQAPGKGLEWVGRIKSKSDGGTRDYAAPVKGRFTISRDDSKNTLYLQMNSLKTEDTAMFYCTTGGTHWGQGTLVTVSS

SEQ ID NO: 181 - protein, 115 aa, synthetic construct
QVQLVQSGAEVKKPGASVKVSCKASGYTFTSYDINWVRQATGQGLEWMGWMNPNSGNTGYAQKFQGRVTMTRNTSISTAYMELSSLRSEDTAVYYCARRSFLDYWGQGTLVTVSS

SEQ ID NO: 182 - protein, 115 aa, synthetic construct
EVQLVESGGGLVKPGGSLRLSCAASGFTFSNAWMSWVRQAPGKGLEWVGRIKSKTDGGTTDYATPVKGRFTISRADSKNTLFLQMSSLKTEDTAVYFCTTGGTNWGQGTLVTVSS

SEQ ID NO: 183 - protein, 116 aa, synthetic construct
EVQLVESGGGLVKPGGSLRLSCAASGFTFSSYSMNWVRQAPGKGLEWVSSISSSSSYIYYADSVKGRFTISRDNAKNSLYLQMNSLRAEDTAVYYCARESSGFDYWGQGTLVTVSS

SEQ ID NO: 184 - protein, 116 aa, synthetic construct
QVQLVQSGAEVKKPGASVKVSCKASGYTFTSYDINWVRQATGQGLEWMGWMNPNSGNTGYAQKFQGRVTMTRNTSISTAYMELSSLRSEDTAVYYCARGSSWFDYWGQGTLVTVSS

SEQ ID NO: 185 - protein, 116 aa, synthetic construct
EVQLVESGGGLVKPGGSLRLSCAASGFTFSNAWMSWVRQAPGKGLEWVGRIKSKTDGGTTDYAAPVKGRFTISRDDSKNTLYLQMNSLKTEDTAVYYCTLNWGDYWGQGTLVTVSS

SEQ ID NO: 186 - protein, 116 aa, synthetic construct
EVQLVESGGGLVKPGGSLRLSCAASGFTFSSYSMNWVRQAPGKGLEWVSSISSSSSYIYYADSVKGRFTISRDNAKNSLYLQMNSLRAEDTAVYYCARAADAFDIWGQGTMVTVSS

SEQ ID NO: 187 - protein, 116 aa, synthetic construct
EVQLVESGGGLVQPGGSLRLSCAASGFTFSSYDMHWVRQATGKGLEWVSAIGTAGDTYYPGSVKGRFTISRENAKNSLYLQMNSLRAGDTAVYYCARGGSDAFDIWGQGTMVTVSS

SEQ ID NO: 188 - protein, 116 aa, synthetic construct
EVQLVESGGGLVKPGGSLRLSCTASEFTFRNAWMIWVRQAPGKGLEWVGRIRSEIDGGTTDYAAPVKGRFTISRDDSKDTLYLYMNSLKVEDTAVYYCTTDHPYYWGHGTLVTVSS

SEQ ID NO: 189 - protein, 116 aa, synthetic construct
EVQLVESGGGLVKPGGSLRLSCAASGFTFSNAWMSWVRQAPGKGLEWVGRIKSKTDGGTTDFTAPVKGRFTISRDDSKNTLYLQMNSLKTEDTAVYYCTTDHPYYWGQGTLVTVSS

SEQ ID NO: 190 - protein, 116 aa, synthetic construct
QVQLVESGGGVVQPGRSLRLSCAASGFTFSNYGIHWVRQAPGKGLEWVAVIWYDGSNEYYVDSVKGRFIISRDNSKNTLYLQMNSLRAEDTALYYCALAVTGFDYWGQGTLVTVSS

SEQ ID NO: 191 - protein, 116 aa, synthetic construct
QVQLVESGGGLVKPGGSLRLSCAASGFTFSDYYMSWIRQAPGKGLEWVSYISSSGSTIYYPDSVKGRFTISRDNAKNSLYLQMNSLRAEDTAVYYCARDGAAFDIWGQGTMVTVSS

SEQ ID NO: 192 - protein, 117 aa, synthetic construct
QIQLVQSGAEMKKPGASVKVSCKASGYTFTNYGISWVRQAPGQGLEWMGWINTYNDKTNFALKVQGRVTMTTDTSTSTAYMELRSLRSDDTAVYYCARDRGYSFDYWGQGTLVTVSS

SEQ ID NO: 193 - protein, 117 aa, synthetic construct
QVQLVQSGAEVKKPGASVKVSCKASGYTFTSYGISWVRQAPGQGLEWMGWISAYNGNTNYAQRLQGRVTMTTDTSTSTAYMELRSLISDDTAVYYCARNHYYYLDVWGKGTTVTVSS

SEQ ID NO: 194 - protein, 117 aa, synthetic construct
EVQLVESGGGLVQPGGSLRLSCAASGFTFSSYDMHWVRQATGKGLEWVSAIGTAGDTYYPGSVKGRFTISRENAKNSLYLQMNSLRAGDTAVYYCARVSPTGTTDYWGQGTLVTVSS

SEQ ID NO: 195 - protein, 117 aa, synthetic construct
EVQLVESGGGLVKPGGSLRLSCAASGFTFSNAWMSWVRQAPGKGLEWVGRIKSKTDGGTTDYAAPVKGRFTISRDDSKNTLYLQMNSLKTEDTAVYYCTARPLGDVWGKGTTVTVSS

SEQ ID NO: 196 - protein, 117 aa, synthetic construct
EVQLVESGGGLVKPGGSLRLSCAASGFTFSNAWMSWVRQAPGKGLEWVGRIKSKTDGGTTDYAAPVKGRFTISRDDSKNTLYLQMNSLKTEDTAVYYCTTDNGFDYWGQGTLVTVSS

SEQ ID NO: 197 - protein, 117 aa, synthetic construct
EVQLVESGGGLVKPGGSLRLSCAASGFTFSSYSMNWVRQAPGKGLEWVSSISSSSSYIYYADSVKGRFTISRDNAKNSLYLQMNSLRAEDTAVYYCARDLISSFDYWGQGTLVTVSS

SEQ ID NO: 198 - protein, 117 aa, synthetic construct
EVQLVESGGGLVQPGGSLRLSCAASGFTFSSYWMSWVRQAPGKGLEWVANIKQDGSEKYYVDSVKGRFTISRDNAKNSLYLQMNSLRAEDTAVYYCARRIVGAFDYWGQGTLVTVSS

SEQ ID NO: 199 - protein, 117 aa, synthetic construct
QVQLIQSGTEVKKPGASVKVSCMASRYTFTSYYIHWVRQAPGQGLEWMGIINPSGGTTGYAQKFQGRVTMTRDTSTSTVYMELYSLRSEDTAVYYCARGGWGTMDVWGKGTTVTVSS

SEQ ID NO: 200 - protein, 117 aa, synthetic construct
EVQLVESGGGLVQPGGSLRLSCAASGFTFSSYSMNWVRQAPGKGLEWVSYISSSSSTIYYADSVKGRFTISRDNAKNSLYLQMNSLRDEDTAVYYCAREGWELLDYWGQGTLVTVSS

SEQ ID NO: 201 - protein, 117 aa, synthetic construct
EVQLVESGGGLIQPGGSLRLSCAASGLTVSTNYMSWVRQAPGKGLEWVSVLYSGGGTYYADSVKGRFTISRDNSKNTLCLQMNSLRAEDTAMYYCARDNWDSYFDYWGQGTLVTVSS

SEQ ID NO: 202 - protein, 117 aa, synthetic construct
EVQLVESGGGVVRPGGSLRLSCAASGFTFDDYGMSWVRQAPGKGLEWVSGINWNGGSTGYADSVKGRFTISRDNAKNSLYLQMNSLRAEDTALYYCARTTVTHMDVWGKGTTVTVSS

SEQ ID NO: 203 - protein, 117 aa, synthetic construct
EVQLVESGGGLIQPGGSLRLSCAASGFTVSSNYMSWVRQAPGKGLEWVSVIYSGGSTYYADSVKGRFTISRDNSKNTLYLQMNSLRAEDTAVYYCARDWNYDAFDIWGQGTMVTVSS

SEQ ID NO: 204 - protein, 117 aa, synthetic construct
EVQLVESGGGLVKPGGSLRLSCAASGFTFSSYSMNWVRQAPGKGLEWVSSISSSSSYIYYADSVKGRFTISRDNAKNSLYLQMNSLRAEDTAVYYCARGDPGWFDPWGQGTLVTVSS

SEQ ID NO: 205 - protein, 118 aa, synthetic construct
EVQLVESGGGLVQPGGSLRLSCAASGFTFSSYWMHWVRQAPGKGLVWVSRINSDGSSTSYADSVKGRFTISRDNAKNTLYLQMNSLRAEDTAVYYCARENWNYWFDPWGQGTLVTVSS

SEQ ID NO: 206 - protein, 118 aa, synthetic construct
QVQLQESGPGLVKPSGTLSLTCAVSGGSISSNNWWSWVRQPPGKGLEWIGEIYHSGSTNYNPSLKSRVTISVDKSKNQFSLKVNSVTAADTAIFYCARLRPGDSFDYWGLGTLVTVSS

SEQ ID NO: 207 - protein, 118 aa, synthetic construct
QVHLVQSGSELKKPGASVKVSCKASGYTFTRNGLNWVRQAPGQGLEWMGWINTNIGNPTYAQGFTGRFVFSLDTSVSTAYLQISRLQAEDTAVYYCARSPNWGLFDYWGQGTLVTVSS

SEQ ID NO: 208 - protein, 118 aa, synthetic construct
EVQLVESGGGLVKPGGSLRLSCAASGFTFSSYSMNWVRQAPGKGLEWVSSISSSSSYIYYADSVKGRFTISRDNAKNSLYLQMNSLRAEDTAVYYCARDRGATGFDYWGQGTLVTVSS

SEQ ID NO: 209 - protein, 118 aa, synthetic construct
QVQLVQSGAEVKKPGASVKVSCKASGYTFTSYGISWVRQAPGQGLEWMGWISAYNGNTNYAQKLQGRVTMTTDTSTSTAYMELRSLRSDDTAVYYCARESGELLGDYWGQGTLVTVSS

SEQ ID NO: 210 - protein, 118 aa, synthetic construct
EVQLVESGGGLVQPGGSLRLSCAASGFTFSSYDMHWVRQATGKGLEWVSAIGTAGDTYYPGSVKGRFTISRENAKNSLYLQMNSLRAGDTAVYYCARYSGSYYYFDYWGQGTLVTVSS

SEQ ID NO: 211 - protein, 118 aa, synthetic construct
QVQLVESGGGVVQPGRSLRLSCAASGFTFSSYGMHWVRQAPGKGLEWVAVIWYDGSNKYYADSVKGRFTISRDNSKNTLYLQMNSLRAEDTAVYYCARGIAAAGKDYWGQGTLVTVSS

SEQ ID NO: 212 - protein, 118 aa, synthetic construct
EVQLVQSGAEVKKPGESLKISCKGSGYSFTSYWIGWVRQMPGKGLEWMGIIYPGDSDTRYSPSFQGQVTISADKSISTAYLQWSSLKASDTAMYYCARQDSNYVFDYWGQGTLVTVSS

SEQ ID NO: 213 - protein, 118 aa, synthetic construct
EVQLVESGGGLVQPGGSLRLSCAASGFTFSNYWMSWVRQAPGKGLEWVANIKYDGREQYYVDSVKGRFAISRDNAKNSLSLQMNSLRAEDTAIYYCARDHSAWSFDYWGQGTLVTVSS

SEQ ID NO: 214 - protein, 118 aa, synthetic construct
EVQLVESGGGLVQPGGSLRLSCAASGFTFSSYWMSWVRQAPGKGLEWVANIKQDGSEKYYVDSVKGRFTISRDNAKNSLYLQMNSLRAEDTAVYYCARRRGSCSFDYWGQGTLVTVSS

SEQ ID NO: 215 - protein, 118 aa, synthetic construct
QVQLVQSGAEVKKPGASVKVSCKASGYTFTSYGISWVRQAPGQGLEWMGWISAYNGNTNYAQKLQGRVTMTTDTSTSTAYMELRSLRSDDTAVYYCARRSYANCFDYWGQGTLVTVSS

SEQ ID NO: 216 - protein, 118 aa, synthetic construct
EVQLVESGGGLVQPGGSLRLSCAASGFTFSSYWMHWVRQAPGKGLVWVSRINSDGSSTSYADSVKGRFTISRDNAKNTLYLQMNSLRAEDTAVYYCARDEQLVPFDIWGQGTMVTVSS

SEQ ID NO: 217 - protein, 118 aa, synthetic construct
EVQLVESGGGLIQPGGSLRLSCAASGFTVSSNYMSWVRQAPGKGLEWVSVIYSGGSTYYADSVKGRFTISRDNSKNTLYLQMNSLRAEDTAVYYCARDGAAAGDFQHWGQGTLVTVSS

SEQ ID NO: 218 - protein, 118 aa, synthetic construct
EVQLVESGGGLVQPGRSLRLSCAASGFTFDDYAMHWVRQAPGKGLEWVSGISWNSGSIGYADSVKGRFTISRDNAKNSLYLQMNSLRAEDTALYYCAKDSGSYYFDYWGQGTLVTVSS

SEQ ID NO: 219 - protein, 118 aa, synthetic construct
QVQLVESGGGLVKPGGSLRLSCAASGFTFSDYYMSWIRQAPGKGLEWVSYISSSGSTIYYADSVKGRFTISRDNAKNSLYLQMNSLRAEDTAVYYCARDGQLWSFDYWGQGTLVTVSS

SEQ ID NO: 220 - protein, 118 aa, synthetic construct
EVQLVESGGGLIQPGGSLRLSCAASGFTVSRNYMSWVRQAPGKGLEWVSIIYAGGNTYYADSVKGRFTISRDNSKNTLYLQMNSLRAEDTGVYYCGRVVPIGNWFDPWGQGTLVTVSS

SEQ ID NO: 221 - protein, 118 aa, synthetic construct
EVQLVESGGGLVQPGGSLRLSCAASGFTFSSYWMSWVRQAPGKGLEWVANIKQDGSEKYYVDSVKGRFTISRDNAKNSLYLQMNSLRAEDTAVYYCARDSNWGVFDYWGQGTLVTVSS

SEQ ID NO: 222 - protein, 118 aa, synthetic construct
EVQLVESGGGLVQPGGSLRLSCAASGFTFSSYWMSWVRQAPGKGLEWVANIKQDGSEKYYVDSVKGRFTISRDNAKNSLYLQMNSLRAEDTAVYYCARDRLTGDLDYWGQGTLVTVSS

SEQ ID NO: 223 - protein, 119 aa, synthetic construct; identical to SEQ ID NO: 3

SEQ ID NO: 224 - protein, 119 aa, synthetic construct
EVQLVESGGGLVKPGGSLRLSCAASGFTFSSYSMNWVRQAPGKGLEWVSSISSSSSYIYYADSVKGRFTISRDNAKNSLYLQMNSLRAEDTAVYYCARQQWLGYYFDYWGQGTLVTVSS

SEQ ID NO: 225 - protein, 119 aa, synthetic construct
EVQLVESGGGLVQPGGSLRLSCAASGFTFSIYWMSWVRQAPGKGLEWVATIKEDGSEKYYVDSVKGRFTISRDNAKNSLFLQMNSLRADDTAVYYCARDSNFLYYFDYWGQGDLVTVSS

SEQ ID NO: 226 - protein, 119 aa, synthetic construct
QVQLVQSGAEVKKPGASVKVSCKASGYTFTSYGISWVRQAPGQGLEWMGWISAYNGNTNYAQKLQGRVTMTTDTSTNTAYMELRSLRSDDTAVYYCARQITGTRGFDYWGQGTLVTVSS

SEQ ID NO: 227 - protein, 119 aa, synthetic construct
QVQLVQSGAEVKKPGASVKVSCKASGYTFTSYDINWVRQATGQGLEWMGWMNPNSGNTGYAQKFQGRVTMTRNTSISTAYMELSSLRSEDTAVYYCARMGYSNYPFDYWGQGTLVTVSS

SEQ ID NO: 228 - protein, 119 aa, synthetic construct
QVQLVQSGSEVKKPGASVKVSCKASGYTFTSYYMHWVRQAPGQGLEWMGIINPSGGSTSYAQKFQGRVTMTRDTSTSTVYMELSSLRSEDTAVYYCARGIPTTVTPDYWGQGTLVTVSS

SEQ ID NO: 229 - protein, 119 aa, synthetic construct
EVQLVESGGGLVQPGGSLRLSCAASGFTFSSYDMHWVRQATGKGLEWVSAIGTAGDTYYPGSVKGRFTISRENAKNSLYLQMNSLRAGDTAVYYCARAGLLTGDAFDIWGQGTMVTVSS

SEQ ID NO: 230 - protein, 119 aa, synthetic construct
EVQLVESGGGLVKPGGSLRLSCAASGFTFSNAWMSWVRQAPGKGLEWVGRIKSKTDGGTTDYAAPVKGRFTISRDDSKNTLYLQMNSLKTEDTAVYYCITGTTFPFDYWGQGTLVTVSS

SEQ ID NO: 231 - protein, 118 aa, synthetic construct
EVQLVESGEGLVQPGGSLRLSCAASGFTFSSHAMHWVRQAPGKGLEYVSAISSNGGNTYYADSVKGRFTISRDNSKNTLYLQVGSLRPEDMAIYYCTKGGVGASFDYWGQGTLVTVSS

SEQ ID NO: 232 - protein, 119 aa, synthetic construct
EVQLVESGGGLVKPGGSLRLSCAASGFTFSSYSMNWVRQAPGKGLEWVSSISSSSSYIYYADSVKGRFTISRDNAKNSLYLQMNSLRAEDTAVYYCARGDYSNYYFDYWGQGTLVTVSS

SEQ ID NO: 233 - protein, 112 aa, synthetic construct
QVQLQQWGAGLLKPSETLSLTCAVYGGSFSGYYWSWIRQPPGKGLEWIGEINHSGSTNYNPSLKSRVTISVDTSKNQFSLKLSSVTAADTAVYYCARWEQPWGQGTLVTVSS

SEQ ID NO: 234 - protein, 119 aa, synthetic construct
QVQLVQSGAEVKKPGASVKVSCKASGYTFTSYYMHWVRQAPGQGLEWMGIINPSGGSTSYAQKFQGRVTMTRDTSTSTVYMELSSLRSEDTAVYYCARRTGTTHYFDYWGQGTLVTVSS

SEQ ID NO: 235 - protein, 119 aa, synthetic construct
QVQLVESGGGLVKPGGSLRLSCAASGFTFSDYYMSWIRQAPGKGLEWVSYISSSGSTIYYADSVKGRFTISRDNAKNSLYLQMNSLRAEDTAVYYCARGLWLGLYFDYWGQGTLVTVSS

SEQ ID NO: 236 - protein, 119 aa, synthetic construct
EVQLVQSGAEVKKPGESLKISCKGSGYSFTSYWIGWVRQMPGKGLEWMGIIYPGDSDTRYSPSFQGQVTISADKSISTAYLQWSSLKASDTAMYYCARFLGSSYYFDYWGQGTLVTVSS

SEQ ID NO: 237 - protein, 119 aa, synthetic construct
EVQLVESGGGLVQPGGSLRLSCAASGFTFSSYSMNWVRQAPGKGLEWVSYISSSSSTIYYADSVKGRFTISRDNAKNSLYLQMNSLRDEDTAVYYCARGGAAAGAFDIWGQGTMVTVSS

SEQ ID NO: 238 - protein, 120 aa, synthetic construct
QVQLQESGPGLVKPSQTLSLTCTVSGGSISSGGYYWSWIRQHPGKGLEWIGYIFYSGSTYYNPSLKSRVTISVDTSKKQYSLKLRSVTAADTAVYYCARAEWELLWFDPWGQGTLVTVSS

SEQ ID NO: 239 - protein, 120 aa, synthetic construct
QITLKESGPTLVKPTQTLTLTCTFSGFSLSTSGVGVGWIRQPPGKALEWLALIYWNDDKRYSPSLKSRLTITKDTSKNQVVLTMTNMDPVDTATYFCAHNYFYISGYFYWGQGTLVTVSS

SEQ ID NO: 240 - protein, 120 aa, synthetic construct
QVQLVESGGGVVQPGRSLRLSCAASGFTFSSYGMHWVRQAPGKGLEWVAVISYDGSNKYYADSVKGRFTISRDNSKNTLYLQMNSLRAEDTAVYYCAKDPLRVVNYMDVWGKGTTVTVSS

SEQ ID NO: 241 - protein, 120 aa, synthetic construct
QITLKESGPTLVKPTQTLTLTCTFSGFSLSTSGVGVGWIRQPPGKALEWLALIYWSDDKRYSPSLKNRLTITKDTSKNQVVLTMTNMDPLATATYYCAQTGYNSWSFDYWGQGTLVTVSS

SEQ ID NO: 242 - protein, 120 aa, synthetic construct
QVQLVQSGAEVKKPGASVKVSCKASGYPFTSYGINWVRQAPGQGLEWMGWISAYNSNTNYAEKFQGRVTMTTDTSTTTAYMDLRSLRSDDTAVYYCAREDAWNYGWFDPWGQGTLVTVSS

SEQ ID NO: 243 - protein, 120 aa, synthetic construct
QVQLVQSGAEVKKPGASVKVSCKASGYSFTGYDISWVRQAPRQGLEWMGWISAYNGNTNYAQKFQARVTMTTDTSTSTAYMELRSLRSDDTAVYYCAREILWLGGYFDYWGQGTLVTVSS

SEQ ID NO: 244 - protein, 120 aa, synthetic construct
QVHLVQSGSELKKPGASVKVSCKASGYTFSSYDMNWIRQAPGQGLEWMGWINTNTGNPTYAQGFTGRFVFSLDTSVSTAYLQISSLKAEDTAVYYCAREYSSGWYYFDYWGQGALVTVSS

SEQ ID NO: 245 - protein, 120 aa, synthetic construct
QVQLVQSGAEVKKPGASVKVSCKASGYTFTGYYMHWVRQAPGQGLEWMGWINPNSGGTNYAQKFQGRVTMTRDTSISTAYMELSRLRSDDTAVYYCARERIAVAPPFDYWGQGTLVTVSS

SEQ ID NO: 246 - protein, 120 aa, synthetic construct
QVQLVQSGAEVKKPGASVKVSCKASGYTFTSYDINWVRQATGQGLEWMGWMNPNSGNTGYAQKFQGRVTMTRNTSISTAYMELSSLRSEDTAVYYCARAGWELPEYFQHWGQGTLVTVSS

SEQ ID NO: 247 - protein, 120 aa, synthetic construct
QVQLVQSGAEVKKPGASVKVSCKASGYTFTSYDINWVRQATGQGLEWMGWMNPNSGNTGYAQKFQGRVTMTRNTSISTAYMELSSLRSEDTAVYYCARGGDDYSNLFDYWGQGTLVTVSS

SEQ ID NO: 248 - protein, 120 aa, synthetic construct
QVQLVQSGAEVKKPGSSVKVPCKASGDTFSNFAINWVRQAPGQGLEWMGGIIPIFATANYAQNFQGRVTITADESTSAAYMEVSSLRFEDTAVYYCARTPLGIGRSFDLWGQGTMVTVSS

SEQ ID NO: 249 - protein, 120 aa, synthetic construct
EVHLVESGGGLVKPGGSLRLSCAASGFTFSNAWMSWVRQAPGKGLEWVGRIKRKTDGGTTDFASPVKGRFTISRDDSNNTLYLQMNSLKTEDTAVYYCTTASTVTTGDYWGQGTLVTVSS

SEQ ID NO: 250 - protein, 119 aa, synthetic construct
QVQLQQSGPGLVKPSQTLSLTCAISGDSVSSNSAAWNWIRQSPSRGLEWLGRTYYRSKWYNDYAVSVKSRITINPDTSKNQFSLQLNSVTPEDTAVYYCARERTEIDYWGQGTLVTVSS

SEQ ID NO: 251 - protein, 120 aa, synthetic construct
EVQLVESGGGLVKPGGSLRLSCAASGFTFNNAWMIWVRQAPGKGLEWVGRIKSKTDGGTTDYGAPVKGRFTISRDDSKNTLYLQMNSLKTEDTAVYYCTTGRYFDWFDYWGQGTLVIVSS

SEQ ID NO: 252 - protein, 120 aa, synthetic construct
EVQLVESGGGLVKPGGSLRLSCAASGFTFSNAWMSWVRQAPGKGLEWVGRIKSKTDGGTTDYAAPVKGRFTISRDDSKNTLYLQMNSLKTEDTAVYYCTTASGSYWFDPWGQGTLVTVSS

SEQ ID NO: 253 - protein, 120 aa, synthetic construct
QVQLVESGGGVVQPGRSLRLSCAASGFTFSSYGMHWVRQAPGKGLEWVAVISYDGSNKYYADSVKGRFTISRDNSKNTLYLQMNSLRAEDTAVYYCAKGNWNYGDAFDIWGQGTMVTVSS

SEQ ID NO: 254 - protein, 120 aa, synthetic construct
QVQLVESGGGVVRPGGSLRLSCAASGFTFDDYGMSWVRQAPGKGLEWVSGINWNGGSTGYADSVKGRFTISRDNAKNSLYLQMNSLRAEDTALYYCARENYDFWSGFDPWGQGTLVTVSS

SEQ ID NO: 255 - protein, 119 aa, synthetic construct
QVHLQQSGPGLVKPSQTLSLTCAISGDSVSSNSAAWNWIRQSPSRGLEWLGRTYYRSKWYNGYAESVKSRITINPDTSKNQFSLQLNSVTPEDTAVYYCAREDRGFDYWGQGTLVTVSS

SEQ ID NO: 256 - protein, 120 aa, synthetic construct
EVQLVESGGGLVQPGRSLRLSCAASGFTFDDYAMHWVRQAPGKGLEWVSGISWNSGSIGYADSVKGRFTISRDNAKNSLYLQMNSLRAEDTALYYCAKRAVVTDYYMDVWGKGTTVTVSS

SEQ ID NO: 257 - protein, 120 aa, synthetic construct
EVQLVESGGGLVQPGGSLRLSCAASGFTFSSYSMNWVRQAPGKGLEWVSYISSSSNTIYYADSVKGRFTISRDNAKNSLYLQMSSLRDEDTAVYYCARTSSWSYDAFDIWGQGTMVTVSS

SEQ ID NO: 258 - protein, 121 aa, synthetic construct
QVQLVQSGAEVKKPGASVKVSCKASGYTFTSYYMHWVRQAPGQGLEWMGIINPSGGSTSYAQKFQGRVTMTRDTSTSTVYMELSSLRSEDTAVYYCARERGHTVTPYFDYWGQGTLVTVSS

SEQ ID NO: 259 - protein, 121 aa, synthetic construct
EVQLVESGGGLVQPGGSLRLSCAASGFNFSSYNMNWVRQTPGKGLEWVSYISNTGNTIYYVDSVKGRFTISRDNAKNSLYLQLNSLRDEDTAVYFCARDGPQVGATDFDYWGQGTLVTVSS

SEQ ID NO: 260 - protein, 121 aa, synthetic construct
EVQLVESGGGLVKPGGSLRLSCAASGFTFSNAWMSWVRQAPGKGLEWVGRIKRKTDGGTTDYAAPVKGRFTISRDDSKNTLYLQMNSLKTEDTAVYYCTTEYSSSENFDYWGQGTLVTVSS

SEQ ID NO: 261 - protein, 121 aa, synthetic construct
EVQLVESGGGLVQPGGSLRLSCAASGFTFSSYWMHWVRQAPGKGLVWVSRINSDGSSTSYADSVKGRFTISRDNAKNTLYLQMNSLRAEDTAVYYCARDLGAARPRGFDYWGQGTLVTVSS

SEQ ID NO: 262 - protein, 121 aa, synthetic construct
EVQLVESGGGLVQPGGSLRLSCAASGFTFSSYAMSWVRQAPGKGLEWVSAISGSGGSTYYADSVKGRFTISRDNSKNTLYLQMNSLRAEDTAVYYCAKEGDSGYDSAFDIWGQGTMVTVSS

SEQ ID NO: 263 - protein, 121 aa, synthetic construct
QVQLQESGPGLVKPSGTLSLTCAVSGGSISSNNWWSWVRQPPGKGLEWIGEIYHSGSTNYNPSLKSRVTISVDKSKNQFSLKLSSVTAADTAVYYCARVLNWNYGDAFDIWGQGTMVTVSS

SEQ ID NO: 264 - protein, 121 aa, synthetic construct
QVQLQESGPGLVKPSGTLSLTCAVSGGSISSSNWWSWVRQPPGKGLEWIGEIYHSGSTNYNPSLKSRVTISVDKSKNQFSLKLSSVTAADTAVYYCARDPSIVGATAFDIWGQGTMVTVSS

SEQ ID NO: 265 - protein, 121 aa, synthetic construct
QVQLQESGPGLVKPSGTLSLTCAVSGGSIISSNWWSWVRQSPGKGLGWIGEIYHSGSTTYNPSLKSRVTISVDKSKNQFSLKLSSVTAADTALYYCARSHIVGVNGGFDYWGQGTLVTVSS

SEQ ID NO: 266 - protein, 121 aa, synthetic construct
EVQLVESGGGLVKPGGSLRLSCAASGFTFSSYSMNWVRQAPGKGLEWVSSISSSSSYIYYADSVKGRFTISRDNAKNSLYLQMNSLRAEDTAVYYCARDRYNWNYRAFDIWGQGTMVTVSS

SEQ ID NO: 267 - protein, 121 aa, synthetic construct
EVQLVESGGGLVQPGGSLRLSCAASGFTFSSYWMSWVRQAPGKGLEWVANIKQDGSEKYYVDSVKGRFTISRDNAKNSLYLQMNSLRAEDTAVYYCARDLGRGTISWFDPWGQGTLVTVSS

SEQ ID NO: 268 - protein, 121 aa, synthetic construct
QITLKESGPTLVKATQTLTLTCTFSGFSLNSSGVGVVWIRQPPGKALEWLALIYWNGDKRYSQSLKNRLTITEDTSKNQVVLAMTNMDPVDTATYYCTQTGYDSRWSFAYWGQGTLVTVSS

SEQ ID NO: 269 - protein, 121 aa, synthetic construct
QGQLVQSGAEVKKPGASVKVSCKTSGYIFMNYGITWVRHAPGQGLEWMGWISAYNGNTNYAQKVQGRVTMTTDTSTSTANMELRSLRSDDTAVYYCAREGQWRGRGWFALWGQGTQVTVSS

SEQ ID NO: 270 - protein, 121 aa, synthetic construct
QVQLVQSGSELKKPGASVKVSCKASGYTFTNYAMNWVRQAPGQGLEWMGWINTNTGKPTYAQGFTGRFVFSLDTSVSTAHLQISGLKAEDTAVYYCARERYFEDFHYMDVWGKGTTVTVSS

SEQ ID NO: 271 - protein, 121 aa, synthetic construct
QVQLVQSGAEVKKPGASVKVSCKASGYTFTDNYIHWVRRAPGQGLEWMGWLNPNSGGTNFAQKFQGRVTMTRDTSISSVYMILSSLRSDDTAVYYCARSSWLQLTYYFDYWGQGTLVTVSS

SEQ ID NO: 272 - protein, 121 aa, synthetic construct
QVQLVQSGAEVKKPGASVKVSCKASGYTFTSYYIHWVRQAPGQGLEWMGIINPSGGSTSYAQKFQGRVTMTRDTSTSTVYMEVSSLRSEDTAVYYCAREGLQLGSNWFDPWGQGTLVTVFS

SEQ ID NO: 273 - protein, 121 aa, synthetic construct
EVQLVESGGGLVQPGGSLRLSCAASGFTFSSYSMNWVRQAPGKGLEWVSYISSSSSTIYYADSVKGRFTISRDNAKNSLYLQMNSLRDEDTAVYYCARNDILTGEDAFDIWGQGTMVTVSS

SEQ ID NO: 274 - protein, 121 aa, synthetic construct
EVQMVESGGGLVQPGGSLRLSCAASGFTFSNYAMSWVRQAPGKGLGWVSGISGSGGRTYYADSVKGRFTISRDNSKNTLYLQMNSLRAEDTAVYYCAKESIIVGATMFDYWGQGTLVTVSS

SEQ ID NO: 275 - protein, 121 aa, synthetic construct
QVQLVESGGGVVQPGRSLRLSCAASGFTFSSYGMHWVRQAPGKGLEWVAVISYDGSNKYYADSVKGRFTISRDNSKNTLYLQMNSLRAEDTAVYYCAKGIAALGYYYMDVWGKGTTVTVSS

SEQ ID NO: 276 - protein, 121 aa, synthetic construct
EVQLVQSGAEMKKPGESLKISCKDSGYRFSNYWIGWVRQLPGKGLEWMGIIYPGDSDTRYSPSFQGQVTISADKSINTAYLQWNSLKASDTAIYYCAKRRITGSHNWFDPWGQGTLVTVSS

SEQ ID NO: 277 - protein, 121 aa, synthetic construct
QVQLVQSGSELKKPGASVKVSCKASGYTFTSYAMNWVRQAPGQGLEWMGWINTNTGNPTYAQGFTGRFVFSLDTSVSTAYLQISSLKAEDTAVYYCARGGTIFGVVNFDYWGQGTLVTVSS

SEQ ID NO: 278 - protein, 121 aa, synthetic construct
QVQLVESGGGVVQPGRSLRLSCAASGFTFSSYVMHWVRQAPGKGLEWVAVIWYDGSNKYFADSVKGRFTISRDNSNNTLYLQMNSLRAEDTGVYYCLSRSGYSAHNDGDYWGQGTLVTVSS

SEQ ID NO: 279 - protein, 121 aa, synthetic construct
QVQLVQSGAEVKKPGASVKVSCKASGYTFTGYYIFWVRQAPGQGLEWMGWINPNSGGTNYAQKFQGRVTMTRDTSITTAYMELSRLRHDDTAVYYCTKEGLVVRPDWFDPWGQGTLVTVSS

SEQ ID NO: 280 - protein, 120 aa, synthetic construct
QVQLQQSGPGLVKPTQTLSLTCAISGDSVSSNSAAWNWIRQSPSRGLEWLGRTYYRSKWYNDYAVSVRSRITINPDTSKNQFSLHLNSVTPEDTAVYYCARKGRDVFDIWGQGTMVTVSS

SEQ ID NO: 281 - protein, 121 aa, synthetic construct
QVQLVQSGAEVKKPGASVKVSCKASGYTFTSYGISWVRQAPGQGLEWMGWISAYNGNTNYAQKLQGRVTMTTDTSTSTAYMELRSLRSDDTAVYYCAREGSGSYSDAFDIWGQGTMVTVSS

SEQ ID NO: 282 - protein, 121 aa, synthetic construct
QITLKESGPTLVKPTQTLTLTCTFSGFSITTSGVGVGWIRQPSGKALEWLALIYWNDDKRYSPSLKSRLTITKDTSKNQVVLTMTNMDPVDTATYYCTHTEYRNTWCVDYWGQGTLVTVSS

SEQ ID NO: 283 - protein, 121 aa, synthetic construct
QITLKESGPTLVKPTQTLTLTCTFSGFSLSTSGVGVGWIRQPPGKALEWLALIYWNDDKRYSPSLKSRLTITKDTSKNQVVLTMTNMDPVDTATYYCAHSPYTSGWPFDYWGQGTLVTVSS

SEQ ID NO: 284 - protein, 121 aa, synthetic construct
QVQLVQSGAEVKKPGASVKVSCKASGYTFTSYDINWVRQATGQGLEWMGWMNPNSGNTGYAQKFQGRVTMTRNTSISTAYMELSSLRSEDTAVYYCARVSYSSSWSLFDYWGQGTLVTVSS

SEQ ID NO: 285 - protein, 122 aa, synthetic construct
QVTLRESGPALVKPTQTLTLTCTFSGFSLSTSGMSLSWIRQPPGKALEWLALIDWDDDQYYSTSLKTRLTISKDTSKNQVVLSMTNMDPVDTATYYCARIRGVGALDGFDFWGQGTMVTVSS

SEQ ID NO: 286 - protein, 122 aa, synthetic construct
QVQLVQSGAEVKKPGASVKVSCKASGYTFTSYGISWVRQAPGQGLEWMGWISGYKGNTNCAQELQGRVTITSDTSTSTAYMELRSLRSDDTAVYYCARPLDYGDYEGWFDPWGQGTLVTVSS

SEQ ID NO: 287 - protein, 122 aa, synthetic construct
QVQLAQSGIEMRKPGASVKVSCRASGDTFTNCGFGWVRQAPGQGLEWMGWISAYNGNTNYAQKFQGRVTMTTDTSTSTAYMELRSLRSDDTAVYYCAREGRTNYFYYYMDVWGKGTTVTVSS

SEQ ID NO: 288 - protein, 122 aa, synthetic construct
EVQLVESGGGLVQPGRSLRLSCAASGFTFDDYAMHWVRQAPGKGLEWVSGISKNSGSIGYADSVKGRFTISRDNAKKSLYLQMNSLRVEDTALYYCAKDITASGDYYYMDVWGKGTTVTVSS

SEQ ID NO: 289 - protein, 122 aa, synthetic construct
EVQLVESGGGLVQPGGSLRLSCAASGFTFSSYSMNWVRQAPGKGLEWVSYISSSSSTIYFADSVKGRFTISRDNAKNSLYLQMNSLRDEDTAVYYCARDRVYNWNDGAFDIWGQGTMVTVSS

SEQ ID NO: 290 - protein, 122 aa, synthetic construct
EVQLVESGGGLVQPGGSLRLSCAASGFTFSSYAMSWVRQAPGKGLEWVSAISGSGGSTYYADSVKGRFTISRDNSKNTMYLQMNSLRAEDTAVYYCAKDQRYNWNSWYFDLWGRGTLVTVSS

SEQ ID NO: 291 - protein, 122 aa, synthetic construct
QVQLVESGGGVVQPGRSLRLSCAASGFTFSSYGMHWVRQAPGKGLEWVAVIWYDGSNKYYADSVKGRFTISRDNSKNTLYLQMNSLRAEDTAVYYCARDHGGVTTYNWFDPWGQGTLVTVSS

SEQ ID NO: 292 - protein, 122 aa, synthetic construct
QVQLVQSGAEVKKPGASVKVSCKASGYTFTGYYMHWVRQAPGQGLEWMGWINPNSGGTNYAQKFQGRVTMTRDTSISTAYMELSRLRSDDTAVYYCARDRMVRGVLDAFDIWGQGTMVTVSS

SEQ ID NO: 293 - protein, 122 aa, synthetic construct
EVQLVESGGGLVQPGGSLRLSCAASGFTFSSYSMNWVRQAPGKGLEWVSYISSSSSTIYYADSVKGRFTISRDNAKNSLYLQMNSLRDEDTAVYYCVRGYSSGWYNWYFDLWGRGTLVTVSS

SEQ ID NO: 294 - protein, 122 aa, synthetic construct
QVQLVESGGGLVKPGGSLRLSCAASGFTFSDYYMSWIRQAPGKGLEWVSYISSSGSTIYYADSVKGRFTISRDNAKNSLYLQMNSLRAEDTAVYYCARKVPGIAAAGAFDYWGQGTLVTVSS

SEQ ID NO: 295 - protein, 122 aa, synthetic construct
QVQLVQSGSELKKPGASVKVSCKASGYTFNSYAMNWVRQAPGLGLEWMGWINTNTGNPTYAQGFSGRFVFSLDTSVNTAYLQISSLQAEDTAVYFCARGGYGYNFWIRFDPWGQGTLVTVSS

SEQ ID NO: 296 - protein, 116 aa, synthetic construct
QLQLQESGPGLVKPSETLSLTCTVSGGSISRSSYYWGWIRQPPGRGLEWIGSIYYSGSTYYNPSLKSRVTISVDTSKNQFSLKLSSVTAADTGVYYCASYWNFDYWGRGTLVTVSS

SEQ ID NO: 297 - protein, 123 aa, synthetic construct
QVQLQESGPGLVKPSGTLSLTCAVSGGSISSSFWLSWVRQPPGKGLEWIGEIYHSGSTNYNPSLKSRVTISVDKSKNQFSLKLTSVTAADTAVYSCARVLGYSYGYRRWFDPWGQGTLVTVSS

SEQ ID NO: 298 - protein, 123 aa, synthetic construct
EVQLVESGGGLVNPGGSLRLSCAASGFTFSNAWMSWVRQGPGRGLEWVGRIKSKSDGETIDYAAPVKGRFSFSRDDAENTLYLEMNSLKTEDTAVYYCTTEGSFNFYYFMDVWGKGTAVTVSS

SEQ ID NO: 299 - protein, 123 aa, synthetic construct
QVQLQESGPGLVKPSETLSLTCTVSGGSISSYYWSWIRQPPGKGLEWIGHIYYSGSTNYNPSLKSRVTISVDTSKNQFSLKLSSVTAADTAVYYCARDPFYYDFSDYYYMDVWGKGTTVTVSS

SEQ ID NO: 300 - protein, 123 aa, synthetic construct
EVQLVESGGGLVQPGGSLRLSCAASGFTFSSYAMSWVRQAPGKGLEWVSAISGSGGSTYYADSVKGRFTISRDNSKNTLYLQMNSLRAEDTAVYYCAKNEARDYYGSGSFDYWGQGTLVTVSS

SEQ ID NO: 301 - protein, 123 aa, synthetic construct
EVQLVESGGGVVRPGGSLRLSCAASGFTFGDFGMSWVRQAPGKGLEWVSGINWNGGSTGYADSVKGRFTISRDNAKNSLYLQMNSLRAEDTALYYCASLVGATDYYFYYMDVWGKGTTVTVSS

SEQ ID NO: 302 - protein, 122 aa, synthetic construct
QVQLQQSGPGLVKPSQTLSLTCAISGDSVSSNSAAWNWIRQSPSRGLEWLGRTYYRSKWYNDYAVSVKSRITINPDTSKNQFSLQLNSVTPEDTAVYYCARKWELLDAFDIWGQGTMVTVSS

SEQ ID NO: 303 - protein, 123 aa, synthetic construct
EVQLVESGGGLVQPGGSLRLSCAASGFTFSSYSMNWVRQAPGKGLEWVSYISSSSSTIYYADSVKGRFTISRDNAKNSLYLQMNSLRDEDTAVYYCAREERDDYSNYGYFQHWGQGTLVTVSS

SEQ ID NO: 304 - protein, 122 aa, synthetic construct
QVQLQQSGPGLVKPSQTLSLTCAISGDSVSSNSATWNWIRQSPSRGLEWLGRSYYMSKWYNDYAVSVKSRITINPDTSKNQFSLQLNSVTPEDTAVYYCARGDWNYGVLDSWGQGTLVTVSS

SEQ ID NO: 305 - protein, 123 aa, synthetic construct
QVQLVQSGAEVKKPRASVKVSCEASGYTFTTYGISWVRQAPGQGLEWMGWISAYNGNTKYTQKLQGRVAMTTDTSTSTAYMEVRSLRSDDTAVYYCARSGYNWNYDYYFMDVWGTGTTVTVSS

SEQ ID NO: 306 - protein, 124 aa, synthetic construct
EVQLVESGGGVVRPGGSLRLSCAASGFTFDDYGMSWVRQAPGKGLEWVSGINWNGGSTGYADSVKGRFTISRDNAKNSLYLQMNSLRAEDTALYYCARDGCSSTSCYGNWFDPWGQGTLVTVSS

SEQ ID NO: 307 - protein, 123 aa, synthetic construct
QVQLQQSGPGLVKPSQTLSLTCAISGDSVSSNSAAWNWIRQSPSRGLEWLGRTYYRSKWYSDYAVSVKSRITINPDTSKNQFSLQLNSVTPEDTAVYYCARVDFGIVGAIDYWGQGTLVTVSS

SEQ ID NO: 308 - protein, 124 aa, synthetic construct
EVQLVESGGGLVKPGGSLRLSCAASAFTFSNYNMNWVRQAPGKGLEWVSSISSSTSYIYYADSVKGRFTVSRDNAKNSLYLQMNSLRAEDTAVYYCARDRDDFWSGYSPYFDYWGQGTLVTVSS

SEQ ID NO: 309 - protein, 124 aa, synthetic construct
EVQLVESGGGLVKPGGSLRLSCAASGFTFSSYSMNWVRQAPGKGLEWVSSISSSSSYIYYADSVKGRFTISRDNAKNSLYLQMNSLRAEDTAVYYCAREKYDILTGYSPYFDYWGQGTLVTVSS

SEQ ID NO: 310 - protein, 124 aa, synthetic construct
EVQLVESGGGLVKPGGSLRLSCAASGFTFSNAWMSWVRQAPGKGLEWVGRIKSKTDGGTTDYAAPVKGRFTISRDDSKNTLYLQMNSLKTEDTAVYYCTTDQVSGSYGDAFDIWGQGTMVTVSS

SEQ ID NO: 311 - protein, 124 aa, synthetic construct
EVQMVESGGGLVQPGGSLRLSCAASGFTFSSHVMSWVRQAPGKGLEWVSVISGSESSTYYADSVKGRFTISSDNSKNTLYLQMNSLRAEDTAIYYCAKRAGSGTYYRGYYFDYWGQGTLVTVSS

SEQ ID NO: 312 - protein, 124 aa, synthetic construct
LVQLVESGGGVVQPGRSLRLSCAASGFTFSSYGMHWVRQAPGKGLEWVTLIWYDGSNTYYAESVKGRFTISRDNSKSTLYLHMNSLRAEDSAVYYCAGTYYYDSSGYLNYMDVWGKGTTVTVSS

SEQ ID NO: 313 - protein, 117 aa, synthetic construct
QLQLQESGPGLVKPSETLSLTCTVSGGSISSSSYYWGWIRQPPGKGLEWIGSIHYSGSTYYNPSLKSRVTTSVDTSKNQFSLKLSSVTAADTAVYYCASEGPYFDYWGQGTLVTVSS

SEQ ID NO: 314 - protein, 124 aa, synthetic construct
QVQLVQSGAEVKKPGASVKVSCKASGYSFSSYGIGWVRQAPGQGLEWMGWISGYNGNTNYAQKFQGRVTMTTDTSTSTAHMEVKSLRSDDTAAYYCARAYCGGDCYYSNAFDAWGQGTMVTVSS

SEQ ID NO: 315 - protein, 124 aa, synthetic construct
EVQLVESGGGLVKPGGSLRLSCAASGFTFSNAWMSWVRQAPGKGLEWVGRIKSKTDGGTTDYAAPVKGRFTISRDDSKNTLYLQMNSLKTEDTAVYYCTTDRVTIFGLARMDVWGKGTTVTVSS

SEQ ID NO: 316 - protein, 125 aa, synthetic construct
EVQLVESGGGLVQPGGSLRLSCAASGFTFSTYSVKWVRQAPGKGLEWVSYISSGSSTIYYADSVKGRFTISRDNAKNSLYLQMNSLRDEDTAVYYCARDPTTIFGVVPYYYMDVWGTGTTVTVSS

SEQ ID NO: 317 - protein, 125 aa, synthetic construct
EVQLVESGGGLVKPGGSLRLSCAASGFTFSNAWMSWVRQAPGKGLEWVGRIKSKTDGGTTDYAAPVKGRFTISRDDSKNTLYLQMNSLKTEDTAVYYCTTDRDYYGSGSYYFDYWGQGTLVTVSS

SEQ ID NO: 318 - protein, 118 aa, synthetic construct
QLQLQESGPGLVKPSETLSLTCTVSGGSITTRSYYWGWLRQPPGKGLEWIGTFYYSGNTYYNPSLQSRVSISVDASKNQFSLQLSSVTAADTAVFYCAREDLIGNDYWGQGTLVTVSS

SEQ ID NO: 319 - protein, 124 aa, synthetic construct
QVHLQQSGPGLVKPSQTLSLTCAISGDSVSSNSAAWNWIRQSPSRGLEWLGRTYYRSKWYNDYAVSVKSRITINSDTSKNQFSLQLNSVTPEDTAVYYCSRDRLIVGASYFDLWGRGTLVTVSS

SEQ ID NO: 320 - protein, 125 aa, synthetic construct
EVQLVESGGGVVRPGGSLRLSCAASGFTFDDYGMSWVRQAPGKGLEWVSGINWNGGSTGYADSVKGRFTISRDNAKNSLYLQMNSLRAEDTALYYCAREKAPAHRSSWSWYFDLWGRGTLVTVSS

SEQ ID NO: 321 - protein, 125 aa, synthetic construct
QVQLVHSGAEVKKPGASVKVSCKASGYTFTGNYIHWVRQAPGQGLEWMGWINPTSGVTNYAQKFQGRVTLTRDTSISTAYMELSRLRSDDTAVYYCTREGIAAANPGYFYYMDVWGKGTTVTVSS

SEQ ID NO: 322 - protein, 126 aa, synthetic construct
QVQLVQSGAEVKKPGASVKVSCKASGYTFTDYYMHWVRQAPGQGLEWMGWINPNSGGTNYAQKFQGRVTMTRDTSISTAYMELSRLRSDDTAVYFCARCDMVRGVIDHYYNYMDVWGKGTTVTVSS

SEQ ID NO: 323 - protein, 126 aa, synthetic construct
QMQLQGSGPGLMKPSETLSLTCTVSGGSISSRSYYWGWIRQPPGKGLEWIGSVFYSGSTYYNPSLKSRVTISVDTSKNQFSLKVISVTAADTAVYYCVRQTYDSWTGYSFFYFDYWGQGTLVTVSS

SEQ ID NO: 324 - protein, 127 aa, synthetic construct
EVQLVESGGGLVQPGGSLKLSCAASGFTFSGSAMHWVRQASGKGLEWVGRIRSKANSYATAYAASVKGRFTISRDDSKNTAYLQMNSLKTEDTAVYYCTRPMITFGGVIVYDAFDIWGQGTMVTVSS

SEQ ID NO: 325 - protein, 120 aa, synthetic construct
QVQLQQWGAGLLKPSETLSLTCAVYGGSFSGYYWSWIRQPPGKGLEWIGEINHSGSTNYNPSLKSRVTISVDTSKNQFSLKLSSVTAADTAVYYCARGWGSSSWYYFDYWGQGTLVTVSS

SEQ ID NO: 326 - protein, 120 aa, synthetic construct
QVQLQQWGAGLLKPSETLSLTCAVYGGSFSGYYWSWIRQPPGKGLEWIGEINRSGSTNYNPSLKTRVTISVDTSKNQFSLQLSSVTAADTAVYYCARGIFGVGGNWFDPWGQGTLVTVSS

SEQ ID NO: 327 - protein, 120 aa, synthetic construct
QLQLQESGPGLVKPSETLSLTCTVSGGSISSSSYYWGWIRQPPGKGLEWIGSIYYSGSTYYNPSLKSRVTISVDTSKNQFSLKLSSVTAADTAVYYCARYSSSWSGFDYWGQGTLVTVSS

SEQ ID NO: 328 - protein, 120 aa, synthetic construct
QLQLQESGPGLVKPSETLSLTCTVSGGSISSSSYYWGWIRQPPGKGLEWIGSIYYSGSTYYNPSLKSRVTISVDTSKNQFSLKLSSVTAADTAVYYCARGGSYYVYFDYWGQGTLVTVSS

SEQ ID NO: 329 - protein, 128 aa, synthetic construct
KVQLVESGGGLVQPGGSLRLSCAASGFTFRSYWMSWVRQAPGKGLEWVANINQDGSEKYYVDSVKGRFTISRDNAKNSLYLHMNSLRAEDTAVYYCSRDTDCSSTSCYFNWNPFFDYWGQGTLVTVSS

SEQ ID NO: 330 - protein, 122 aa, synthetic construct
QLQLQESGPGLVKPSETLSLTCTVSGGSINSSNFYWGWIRQPPGKGLEWFGSIFYSGFTYYNPSLKSRVTISVDTSKNQFSLKLTSVTAADTAVYYCARGGYSYGLNWFDPWGQGTLVTVSS

SEQ ID NO: 331 - protein, 125 aa, synthetic construct
QLQLQESGPGLVKPSETLSLTCTVSGGSISSSSYYWGWIRQPPGKGLEWIGSIYYSGSTYYNPSLKSRVTISVDTSKNQFSLKLSSVTAADTAVYYCARTYYDFWSGYLNWFDPWGQGTLVTVSS

SEQ ID NO: 332 - protein, 125 aa, synthetic construct
QVQLQQWGAGLLKPSETLSLTCAVYGGSFSGYYWSWIRQPPGKGLEWIGEINRGGSTNYNPSLKSRVTISVDTSKNQFSLKLSSVTAADTAVYYCARWRNYYDSSGSPYWYFDLWGRGSLVTVSS

SEQ ID NO: 333 - protein, 125 aa, synthetic construct
QLQLQESGPGLVKPSETLSLTCTVSGGSISSSGYYWGWIRQSPGKGLEWIGSFYYSGSTYYNPSLKSRVTISVDTSKNQFSLKLSSVTAADTAVYYCARQGRITMVRGVIPFDYWGQGTLVTVSS

SEQ ID NO: 334 - protein, 128 aa, synthetic construct
QVQLQQWGAGLLKPSETLSLTCAVYGGSFSGYYWSWIRQPPGKGLEWIGEINHSGSTNYNPSLKSRVTISVDTSKNQFSLKLSSVTAADTAVYYCAGGYCSSTSCRYNWNYGGWFDPWGQGTLVTVSS

SEQ ID NO: 335 - protein, 110 aa, synthetic construct
QSALTQPASVSGSPGQSITISCTGTSSDVGGYNYVSWYQQHPGKAPKLMIYEVSNRPSGVSNRFSGSKSGNTASLTISGLQAEDEADYYCSSYTSSSTWVFGGGTKLTVL

SEQ ID NO: 336 - protein, 114 aa, synthetic construct
QSALTQPASVSGSPGQSITISCTGTSSDVGGYNYVSWYQQHPGKAPKLMIYDVSKRPSGVSNRFSGSKSGNTASLTISGLQAEDEADYYCCSYAGRSTLGIDWVFGGGTKVTVL

SEQ ID NO: 337 - protein, 106 aa, synthetic construct
SYELTQPPSVSVSPGQTASITCSGDKLGDKYACWYQQKPGQSPVLVIYQDSKRPSGIPERFSGSNSGNTATLTISGTQAMDEADYYCQAWDSSTYVFGTGTKVTVL

SEQ ID NO: 338 - protein, 106 aa, synthetic construct
SYELTQPSSVSVSPGQTARITCSGDVLAKKYARWFQQKPGQAPVLVIYKDSERPSGIPERFSGSSSGTTVTLTISGAQVEDEADYYCYSAADNNLVFGGGTKLTVL

SEQ ID NO: 339 - protein, 108 aa, synthetic construct
SSELTQDPAVSVALGQTVRITCQGDSLRSYYASWYQQKPGQAPVLVIYGKNNRPSGIPDRFSGSSSGNTASLTITGAQAEDEADYYCNSRDSSGNHRVFGGGTKLTVL

SEQ ID NO: 340 - protein, 110 aa, synthetic construct
QSALTQPRSVSGSPGQSVTISCTGTSSDVGGYNYVSWYQQHPGKAPKLMIYDVSKRPSGVPDRFSGSKSGNTASLTISGLQAEDEADYYCCSYAGSYTWVFGGGTKLTVL

SEQ ID NO: 341 - protein, 110 aa, synthetic construct
QSALTQPPSASGSPGQSVTISCTGTSSDVGGYNYVSWYQQHPGKAPKLMIYEVSKRPSGVPDRFSGSKSGNTASLTVSGLQAEDEADYYCSSYAGSNNLVFGGGTKLTVL

SEQ ID NO: 342 - protein, 110 aa, synthetic construct
QSALTQPASVSGSPGQSITISCTGTSSDVGGYNYVSWYQQHPGKAPKLMIYEVSNRPSGVSNRFSGSKSGNTASLTISGLQAEDEADYYCSSYTSSSTYVFGTGTKVTVL

SEQ ID NO: 343 - protein, 111 aa, synthetic construct
QSALTQPASVSGSPGQSITISCTGTSSDVGGYNYVSWYQQHPGKAPKLMIYDVSKRPSGVSNRFSGSKSGNTASLTISGLQAEDEADYYCCSYAGSSTYVVFGGGTKLTVL

SEQ ID NO: 344 - protein, 108 aa, synthetic construct
SSELTQDPAVSVALGQTVRITCQGDSLRSYYASWYQQKPGQAPVLVIYGKNNRPSGIPDRFSGSSSGNTASLTITGAQAEDEADYYCNSRDSSGNHVVFGGGTKLTVL

SEQ ID NO: 345 - protein, 108 aa, synthetic construct
SYVLTQPPSVSVAPGKTARITCGGNNIGSKSVHWYQQKPGQAPVLVIYYDSDRPSGIPERFSGSNSGNTATLTISRVEAGDEADYYCQVWDSSSDHPVFGGGTKLTVL

SEQ ID NO: 346 - protein, 115 aa, synthetic construct
QAVLTQPASLSASPGASASLTCTLRSGINVGTYRIYWYQQKPGSPPQYLLRYKSDSDKQQGSGVPSRFSGSKDASANAGILLISGLQSEDEADYYCMIWHSSAVVFGGGTKLTVL

SEQ ID NO: 347 - protein, 107 aa, synthetic construct
SSELTQDPAVSVALGQTVRITCQGDSLRSYYASWYQQKPGQAPVLVIYGKNNRPSGIPDRFSGSSSGNTASLTITGAQAEDEADYYCNSRDSSGNWVFGGGTKLTVL

SEQ ID NO: 348 - protein, 109 aa, synthetic construct
SYELTQPPSVSVSPGQTARITCSGDALPKKYAYWYQQKSGQAPVLVIYEDSKRPSGIPERFSGSSSGTMATLTISGAQVEDEADYYCYSTDSSGNHSWVFGGGTKLTVL

SEQ ID NO: 349 - protein, 110 aa, synthetic construct
QSALTQPASVSGSPGQSITISCTGTSSDVGGYNYVSWYQQHPGKAPKLMIYEVSNRPSGVSNRFSGSKSGNTASLTISGLQAEDEADYYCSSYTSSSTLVFGGGTKLTVL

SEQ ID NO: 350 - protein, 116 aa, synthetic construct
QAVLTQPASLSASPGASASLTCTLRSGINVGTYRIYWYQQKPGSPPQYLLRYKSDSDKQQGSGVPSRFSGSKDASANAGILLISGLQSEDEADYYCMIWHSSAYVVFGGGTKLTVL

SEQ ID NO: 351 - protein, 107 aa, synthetic construct
SYELTQPPSVSVSPGQTASITCSGDKLGDKYACWYQQKPGQSPVLVIYQDSKRPSGIPERFSGSNSGNTATLTISGTQAMDEADYYCQAWDSSTAWVFGGGTKLTVL

SEQ ID NO: 352 - protein, 108 aa, synthetic construct
SYELTQPPSVSVSPGQTARITCSGDALPKKYAYWYQQKSGQAPVLVIYEDSKRPSGIPERFSGSSSGTMATLTISGAQVEDEADYYCYSTDSSGNHKVFGGGTKLTVL

SEQ ID NO: 353 - protein, 108 aa, synthetic construct
SSEMTQDPAVSVALGQTVRITCQGDSLRSYYASWYQQKPGQAPVLVIYGKNNRPSGIPDRFSGSSSGNTASLTITGAQAEDEADYYCNSRDSSGNHWVFGGGTKLTVL

SEQ ID NO: 354 - protein, 109 aa, synthetic construct
QSALTQPRSVSGSPGQSVTISCTGTSSDVGGYNYVSWYQQHPGKAPKLMIYDVSKRPSGVPDRFSGSKSGNTASLTISGLQAEDEADYYCCSYAGSSWVFGGGTKLTVL

SEQ ID NO: 355 - protein, 110 aa, synthetic construct
QSALTQPASVSGSPGQSITISCTGTSSDVGGYNYVSWYQQHPGKAPKLMIYEVSNRPSGVSNRFSGSKSGNTASLTISGLQAEDEADYYCSSYTSSSTLVFGTGTKVTVL

SEQ ID NO: 356 - protein, 111 aa, synthetic construct
QSALTQPASVSGSPGQSITISCTGTSSDVGGYNYVSWYQQHPGKAPKLMIYDVSKRPSGVSNRFSGSKSGNTASLTISGLQAEDEADYYCCSYAGSSTFVVFGGGTKLTVL

SEQ ID NO: 357 - protein, 111 aa, synthetic construct; identical to SEQ ID NO: 356

SEQ ID NO: 358 - protein, 114 aa, synthetic construct
QSALTQPASVSGSPGQSITISCTGTSSDVGGYNYVSWYQQHPGKAPKLMIYDVSKRPSGVSNRFSGSKSGNTASLTISGLQAEDEADYYCCSYAGSSTLGIDWVFGGGTKLTVL

SEQ ID NO: 359 - protein, 115 aa, synthetic construct
LPVLTQPPSASALLGASIKLTCTLSSEHSTYTIEWYQQRPGRSPQYIMKVKSDGSHSKGDGIPDRFMGSSSGADRYLTFSNLQSDDEAEYHCGESHTIDGQVGVVFGGGTKLTVL

SEQ ID NO: 360 - protein, 115 aa, synthetic construct
LPVLTQPPSASALLGASIKLTCTLSSEHSTYTIEWYQQRPGRSPQYIMKVKSDGSHSKGDGIPDRFMGSSSGADRYLTFSNLQSDDEAEYHCGESHTIDGQVGWVFGGGTKLTVL

SEQ ID NO: 361 - protein, 108 aa, synthetic construct; identical to SEQ ID NO: 344

SEQ ID NO: 362 - protein, 108 aa, synthetic construct
SYVLTQPPSVSVPPGKTARITCGGNNVGSKSVHWYQQKPGQAPVLVIYYDTDRPSGIPERFSGSNSGNTATLSISRVEAGDEADYYCQVWDSRSDHVVFGGGTKLTVL

SEQ ID NO: 363 - protein, 108 aa, synthetic construct
SYVLTQPPSVSVAPGKTARITCGGNTFGSKTVHWYQQKPGQAPVLVIYYDSDRPSGIPERFSGSNSGNTATLTISRVEAGDEADYYCQVWDLYSAHVVFGGGTNLTVL

SEQ ID NO: 364 - protein, 108 aa, synthetic construct
SYELTQPPSVSVSPGQTARITCSGDALPKKYAYWYQQKSGQAPVLVIYEDSKRPSGIPERFSGSSSGTMATLTISGAQVEDEADYYCYSTDSSGNHWVFGGGTKLTVL

SEQ ID NO: 365 - protein, 109 aa, synthetic construct
QSALTQPASVSGSPGQSITISCTGTSSDVGGYNYVSWYQQHPGKAPKLMIYEVSNRPSGVSNRFSGSKSGNTASLTISGLQAEDEADYYCSSYTSSSTVFGGGTKLTVL

SEQ ID NO: 366 - protein, 110 aa, synthetic construct
QSALTQPPSASGSPGQSVTISCTGTSSDVGGYNYVSWYQQHPGKAPKLMIYEVIKRPSGVPDRFSGSKSGNTASLTVSGLQAEDEADYYCSAYAGSNNVVFGGGTQLTVL

SEQ ID NO: 367 - protein, 110 aa, synthetic construct
QSVLTQPPSASGTPGQRVTISCSGSSSNIGSNTVNWYQQLPGTAPKLLIYSNNQRPSGVPDRFSGSKSGTSASLAISGLQSEDEADYYCAAWDDSLNGWVFGGGTKLTVL

SEQ ID NO: 368 - protein, 107 aa, synthetic construct
SYELTQPPSVSVSPGQTARITCSADALPKQYAYWYQQKPGQAPVLVIYKDSERPSGIPERFSGSSSGTTVTLTISGVQAEDEADYYCQSADSSATWVFGGGTKLTVL

SEQ ID NO: 369 - protein, 108 aa, synthetic construct
SYELTQPPSVSVSPGQTARITCSGDALPKKYAYWYQQKSGQAPVLVIYEDSKRPSGIPERFSGSSSGTMATLTISGAQVEDEADYYCYSTDSSGNHRVFGGGTKLTVL

SEQ ID NO: 370 - protein, 108 aa, synthetic construct
SYELTQPPSVSVSPGQTARITCSADALPKQYAYWYQQKPGQAPVVVIYKDSERPSGIPERFSGSSSGTTVTLTISGVQAEDEADYYCQSLDSSGTYWVFGGGTKLTVL

SEQ ID NO: 371 - protein, 106 aa, synthetic construct
SYELTQPPSVSVSPGQTASITCSGDKLGDKYACWYQQKPGQSPVLVIYQDSKRPSGIPERFSGSNSGNTATLTISGTQAMDEADYYCQAWDSSTVVFGGGTKLTVL

SEQ ID NO: 372 - protein, 106 aa, synthetic construct; identical to SEQ ID NO: 371

SEQ ID NO: 373 - protein, 106 aa, synthetic construct; identical to SEQ ID NO: 371

SEQ ID NO: 374 - protein, 108 aa, synthetic construct
SSELTQDPAVSVALGQTVRITCQGDSLRSYYASWYQQKPGQAPVLVIYGKNNRPSGIPDRFSGSSSGNTASLTITGAQAEDEADYYCNSRDSSGNHWVFGGGTKLTVL

SEQ ID NO: 375 - protein, 108 aa, synthetic construct
QSALTQPASVSGSPGQSITISCTGTSSDVGGYNYVSWYQQHPGKAPKLMIYDVSKRPSGVSNRFSGSKSGNTASLTISGLQAEDEADYYCCSYAGSVVFGGGTKLTVL

SEQ ID NO: 376 - protein, 108 aa, synthetic construct; identical to SEQ ID NO: 344

SEQ ID NO: 377 - protein, 108 aa, synthetic construct; identical to SEQ ID NO: 374

SEQ ID NO: 378 - protein, 110 aa, synthetic construct
QSVLTQPPSVSEAPRQRVTISCSGSSSNIGNNAVNWYQQLPGKAPKLLIYYDDLLPSGVSDRFSGSKSGTSASLAISGLQSEDEADYYCAAWDDRLNGPVFGGGTKLTVL

SEQ ID NO: 379 - protein, 110 aa, synthetic construct
QSALTQPASVSGSPGQSITISCTGTSSDVGGYNYVSWYQQHPGKAPKLMIYDVSKRPSGVSNRFSGSKSGNTASLTISGLQAEDETDYYCCSYAGSSTLVFGGGTKLTVL

SEQ ID NO: 380 - protein, 104 aa, synthetic construct
SYELTQPPSVSVSPGQTASITCSGDKLGDKHACWYQQKPGQSPMLVIYQDSKRPSGIPERFSGSNSGNTATLTISGTQPMDEADYYCQAWDSSTFGGGTKLTVL

SEQ ID NO: 381 - protein, 106 aa, synthetic construct
SYELTQPSSVSVSPGQTARITCSGDVLAKKYARWFQQKPGQAPVLVIYKDSERPSGIPERFSGSSSGTTVTLTISGAQVEDEADYYCYSAADNNRVFGGGTKLTVL

SEQ ID NO: 382 - protein, 106 aa, synthetic construct; identical to SEQ ID NO: 338

SEQ ID NO: 383 - protein, 106 aa, synthetic construct
SYELTQPSSVSVSPGQTARITCSGDVLAKKYARWFQQKPGQAPVLVIYKDSERPSGIPERFSGSSSGTTVTLTISGAQVEDEADYYCYSAADNNYVFGTGTKVTVL

SEQ ID NO: 384 - protein, 106 aa, synthetic construct; identical to SEQ ID NO: 338

SEQ ID NO: 385 - protein, 108 aa, synthetic construct
SSELTQDPAVSVALGQTVRITCQGDRLRSYYASWYQQKPGQAPVLVIYGKNNRPSGIPDRFSGSSSGNTASLTITGAQAEDEADYHCNSRDSSGNHLVFGGGTKLTVL

SEQ ID NO: 386 - protein, 108 aa, synthetic construct
SSELTQDPAVSVALGQTVRITCQGDSLRSYYASWYQQKPGQAPVLVIYGKNNRPSGIPDRFSGSSSGNTASLTITGAQAEDEADYYCNSRDSSGNHLVFGGGTKLTVL

SEQ ID NO: 387 - protein, 108 aa, synthetic construct
SYVLTQPPSVSVAPGKTARITCGGNNIGSKSVHWYQQKPGQAPVLVIYYDSDRPSGIPERFSGSNSGNTATLTISRVEAGDEADYYCQVWDSSSDHVVFGGGTKLTVL

SEQ ID NO: 388 - protein, 108 aa, synthetic construct; identical to SEQ ID NO: 369

SEQ ID NO: 389 - protein, 109 aa, synthetic construct
QTVVTQEPSLTVSPGGTVTLTCASSTGAVTSGYYPNWFQQKPGQAPRALIYSTSNKHSWTPARFSGSLLGGKAALTLSGVQPEDEAEYYCLLYYGGARVFGGGTKLTVL

SEQ ID NO: 390 - protein, 110 aa, synthetic construct; identical to SEQ ID NO: 341

SEQ ID NO: 391 - protein, 110 aa, synthetic construct
QSALTQPASVSGSPGQSITISCTGTSSDVGGYNYVSWYQQHPGKAPKLMIYDVSKRPSGVSNRFSGSKSGNTASLTISGLQAEDEADYYCCSYAGSSTWVFGGGTKLTVL

SEQ ID NO: 392 - protein, 111 aa, synthetic construct
QSALTQPASVSGSPGQSITISCTGTSSDVGGYNYVSWYQQHPGKAPKLMIYDVSKRPSGVSNRFSGSKSGNTASLTISGLQAEDEADYYCCSYAGSSTFWVFGGGTKLTVL

SEQ ID NO: 393 - protein, 106 aa, synthetic construct; identical to SEQ ID NO: 371

SEQ ID NO: 394 - protein, 107 aa, synthetic construct
SYELTQPPSVSVSPGQTASITCSGDKLGDKYACWYQQRPGQSPVLVIYQDNKRPSGIPERFSGSNSGNTATLTISGTQAMDEADYYCQAWDSSTALVFGGGTKLTVL

SEQ ID NO: 395 - protein, 107 aa, synthetic construct
SYELTQPPSVSVSPGQTASITCSGDKLGDKYACWYQQKPGQSPVLVIYQDSKRPSGIPERFSGSNSGNTATLTISGTQAMDEADYYCQAWDSSTSGVFGGGTKLTVL

SEQ ID NO: 396 - protein, 108 aa, synthetic construct; identical to SEQ ID NO: 374

SEQ ID NO: 397 - protein, 108 aa, synthetic construct; identical to SEQ ID NO: 369

SEQ ID NO: 398 - protein, 108 aa, synthetic construct; identical to SEQ ID NO: 344

SEQ ID NO: 399 - protein, 108 aa, synthetic construct
SYELTQPPSVSVSPGQTARITCSGDALPKKYAYWYQQKSGQAPVLVIYEDSKRPSGIPERFSGSSSGTMATLTISGAQVEDEADYYCYSTDSSGNHAVFGGGTQLTVL

SEQ ID NO: 400 - protein, 108 aa, synthetic construct; identical to SEQ ID NO: 387

SEQ ID NO: 401 - protein, 110 aa, synthetic construct
QSVLTQSPSAFGTPGQRVTISCSGSISNLGSNTVNWYQQLPGTAPKLLIYSNNQRPSGVPDRFSGSKSGTSASLAISGLQFEDEADYHCATWDDSLNGRVFGGGTKLTVL

SEQ ID NO: 402 - protein, 110 aa, synthetic construct; identical to SEQ ID NO: 341

SEQ ID NO: 403 - protein, 110 aa, synthetic construct
QSALTQPPSASGSPGQSVTISCTGTSSDVGGYNYVSWYQQHPGKAPKLMIYEVSKRPSGVPDRFSGSKSGNTASLTVSGLQAEDEADYYCSSYAGSNNWVFGGGTKLTVL

SEQ ID NO: 404 - protein, 110 aa, synthetic construct
QSALTQPASVSGSPGQSITISCTGTSSDVGGYNYVSWYQQHPGKAPKLMIYDVSKRPSGVSNRFSGSKSGNTASLTISGLQAEDEADYYCCSYAGSSTLVFGGGTKLTVL

SEQ ID NO: 405 - protein, 110 aa, synthetic construct; identical to SEQ ID NO: 391

SEQ ID NO: 406 - protein, 111 aa, synthetic construct
QSALTQPPSASGSPGQSVTISCTGTSSDVGGYNYVSWYQQHPGKAPKLMIYEVSKRPSGVPDRFSGSKSGNTASLTVSGLQAEDEADYYCSSYAGSNNFVVFGGGTKLTVL

SEQ ID NO: 407 - protein, 111 aa, synthetic construct
QSVLTQPPSVSGAPGQRVTISCTGSSSNIGAGYDVHWYQQLPGTAPKLLIYGNSNRPSGVPDRFSGSKSGTSASLAITGLQAEDEADYYCQSYDSSLSDVVFGGGTKLTVL

SEQ ID NO: 408 - protein, 111 aa, synthetic construct
QSVLTQPPSVSGAPGQRVTISCTGSSSNIGAGYDVHWYQQLPGTAPKLLIYGNNNRPSGVPDRFSGSKSGTSASLAITGLQAEDEADYYCQSYDSSLSGWVFGGGTKLTVL

SEQ ID NO: 409 - protein, 115 aa, synthetic construct
QAVLTQPASLSASPGASASLTCTLRSGINVGTYRIYWYQQKPGSPPQYLLRYKSDSDKQQGSGVPSRFSGSKDASANAGILLISGLQSEDEADYYCMIWHSSAWVFGGGTKLTVL

SEQ ID NO: 410 - protein, 115 aa, synthetic construct; identical to SEQ ID NO: 409

SEQ ID NO: 411 - protein, 107 aa, synthetic construct; identical to SEQ ID NO: 4

SEQ ID NO: 412 - protein, 108 aa, synthetic construct; identical to SEQ ID NO: 369

SEQ ID NO: 413 - protein, 108 aa, synthetic construct
SSELTQDPALSVALGQTVRITCQGDSLRSFYASWYQQKPGQAPVLVIYGKSNRPSGIPDRFSGSGSGNTASLTITGAQAEDEADFYCNSRDTSGNYLVFGGGTKLTVL

SEQ ID NO: 414 - protein, 108 aa, synthetic construct; identical to SEQ ID NO: 374

SEQ ID NO: 415 - protein, 108 aa, synthetic construct
SYELTQPPSVSVSPGQTARITCSGDALPKKYAYWYQQKSGQAPVLVIYEDSKRPSGIPERFSGSSSGTMATLTISGAQVEDEADYYCYSTDSSGNHVVFGGGTKLTVL

SEQ ID NO: 416 - protein, 108 aa, synthetic construct; identical to SEQ ID NO: 386

SEQ ID NO: 417 - protein, 108 aa, synthetic construct; identical to SEQ ID NO: 369

SEQ ID NO: 418 - protein, 109 aa, synthetic construct
QTVVTQEPSLTVSPGGTVTLTCASSTGAVTSGYYPNWFQQKPGQTPRALIYSTSNKHSWTPARFSGSLLGGKAALTLSGVQPEDEAEYYCLLYYGGAWVFGGGTKLTVL

SEQ ID NO: 419 - protein, 110 aa, synthetic construct
QSALTQPASVSGSPGQSITISCTGTSSDVGGYNYVSWYQHHPGKAPKLMIYEVSNRPSGVSNRFSGSKSGNTASLTISGLQAEDEADYYCSSYTSSSTWVFGGGTKLTVL

SEQ ID NO: 420 - protein, 110 aa, synthetic construct; identical to SEQ ID NO: 367

SEQ ID NO: 421 - protein, 110 aa, synthetic construct; identical to SEQ ID NO: 403

SEQ ID NO: 422 - protein, 110 aa, synthetic construct; identical to SEQ ID NO: 404

SEQ ID NO: 423 - protein, 110 aa, synthetic construct; identical to SEQ ID NO: 391

SEQ ID NO: 424 - protein, 111 aa, synthetic construct
QSALTQPPSASGSPGQSVTISCTGTSSDVGGYNYVSWYQQHPGKAPKLMIYEVSKRPSGVPDRFSGSKSGNTASLTVSGLQAEDEADYYCSSYAGSNNFEVFGGGTKLTVL

SEQ ID NO: 425 - protein, 115 aa, synthetic construct; identical to SEQ ID NO: 409

SEQ ID NO: 426 - protein, 106 aa, synthetic construct
SYELTQPPSVSVSPGQTASITCSGDKLGDKYACWYQQKPGQSPVVVIYQDSKRPSGIPERFSGSNSGNTATLTISGTQAMDEADYYCQAWDSSTVVFGGGTKLTVL

SEQ ID NO: 427 - protein, 106 aa, synthetic construct
SYELTHPPSVSVSPGQTARITCSADALPKQYAYWYQQKPGQAPVLVIYKDSERPSGIPERFSGSSSGTSVTLTISGVQAEDEADYYCQSANSGTWVFGGGTKLTVL

SEQ ID NO: 428 - protein, 106 aa, synthetic construct
SYELTQPPSVSVSPGQTASITCSGDKLGDKYACWYQQKPGQSPVLVIYQDTKRPSGIPERFSGSNSGNTATLTISGTQAMDEADYYCQAWDSSTVVFGGGTKLTVL

SEQ ID NO: 429 - protein, 107 aa, synthetic construct
SYELTQPPSVSVSPGQTARITCSADALPNQYAYWYQQKPGQAPVLVIYKDSERPSGIPERFSGSSSGTTVTLTISGVQAEDEADYYCQSADSSGTWVFGGGTKLTVL

SEQ ID NO: 430 - protein, 108 aa, synthetic construct; identical to SEQ ID NO: 344

SEQ ID NO: 431 - protein, 108 aa, synthetic construct; identical to SEQ ID NO: 369

SEQ ID NO: 432 - protein, 108 aa, synthetic construct; identical to SEQ ID NO: 386

SEQ ID NO: 433 - protein, 108 aa, synthetic construct; identical to SEQ ID NO: 369

SEQ ID NO: 434 - protein, 108 aa, synthetic construct; identical to SEQ ID NO: 369

SEQ ID NO: 435 - protein, 108 aa, synthetic construct; identical to SEQ ID NO: 369

SEQ ID NO: 436 - protein, 108 aa, synthetic construct
SYVLTQPPSVSVAPGKTARITCGGNNIGSKSVHWYQQTPGQAPVLVIYYDSDRPSGIPDRFSGSNSGNTATLTISRVEAGDEADYYCQVWDSNSDHWVFGGGTKLTVL

SEQ ID NO: 437 - protein, 108 aa, synthetic construct
SYELTQPPSVSVSPGQTARITCSADALPKQYAYWYQQKPGQAPVLVIYKDSERPSGIPERFSGSSSGTTVTLTISGVQAEDEADYYCQSADSSGTYPVFGGGTKLTVL

SEQ ID NO: 438 - protein, 108 aa, synthetic construct; identical to SEQ ID NO: 374

SEQ ID NO: 439 - protein, 109 aa, synthetic construct
QAVVTQEPSLTVSPGGTVTLTCGSSTGAVTSGHYPYWFQQKPGQAPRTLIYDTSNKHSWTPARFSGSLLGGKAALTLSGAQPEDEAEYYCLLSYSGARVFGGGTKLTVL

SEQ ID NO: 440 - protein, 110 aa, synthetic construct; identical to SEQ ID NO: 341

SEQ ID NO: 441 - protein, 110 aa, synthetic construct
QSALTQPASVSGSPGQSITISCTGTSSDVGGYNYVSWYQQHPGKAPKLMIYDVSKRPSGVSNRFSGSKSGNTASLTISGLQAEDEADYYCCSYAGSSTYVFGTGTKVTVL

SEQ ID NO: 442 - protein, 110 aa, synthetic construct
QSALTQPASVSGSPGQSITISCTGTSSDVGGYNYVSWYQQHPGKAPKLMIYEVSNRPSGVSNRFSGSKSGNTASLTISGLQAEDEADYYCSSYTSSSTVVFGGGTKLTVL

SEQ ID NO: 443 - protein, 110 aa, synthetic construct
QSALTQPASVSGSPGQSITISCTGTSSDVGGYNYVSWYQQHPGKAPKLMIYDVSKRPSGVSNRFSGSKSGNTASLTISGLQAEDEADYYCCSYAGSSNVVFGGGTNLTVL

SEQ ID NO: 444 - protein, 111 aa, synthetic construct; identical to SEQ ID NO: 392

SEQ ID NO: 445 - protein, 111 aa, synthetic construct; identical to SEQ ID NO: 406

SEQ ID NO: 446 - protein, 102 aa, synthetic construct
SYELTQPPSVSVSPGQTASITCSGDKLGDKYACWYQQKPGQSPVLVIYQDSKRPSGIPERFSGSNSGNTATLTISGTQAMDEADYYCQATEVFGGGTKLTVL

SEQ ID NO: 447 - protein, 105 aa, synthetic construct
SYELTQPSSVSVSPGQTAKITCSGDVLAKKYARWFQQKPGQVPVLVIYKDSERPSGIPERFSGSSSGATVTLTISGAQVEDEADYYCYSAADNKVFGGGTKLTVL

SEQ ID NO: 448 - protein, 106 aa, synthetic construct
SYELTQPPSVSVSPGQTASITCSGDKLGDKYACWYQQKPGQSPVVVIYQDSKRPSGIPERFSGSNSGNTATLTISGTQAMDEADYYCQAWDSSTAVFGGGTKLTVL

SEQ ID NO: 449 - protein, 106 aa, synthetic construct; identical to SEQ ID NO: 371

SEQ ID NO: 450 - protein, 107 aa, synthetic construct
SYELTQPPSVSVSPGQTARITCSGDALPKKYAYWYQQKSGQAPVLVIYEDSKRPSGIPERFSGSSSGTMATLTISGAQVEDEADYYCYSTDSSGNRVFGGGTKLTVL

SEQ ID NO: 451 - protein, 108 aa, synthetic construct
SYELTQPPSVSVSPGQTARITCSGDALPKKYAYWYQQKSGQAPVLVIYEDSKRPSGIPERFSGSSSGTMATLTISGAQVEDEADYYCYSTDSSGNHRGFGGGTKLTVL

SEQ ID NO: 452 - protein, 108 aa, synthetic construct
QSALTQPRSVSGSPGQSVTISCTGTSSDVGGYNYVSWYQQHPGKAPKLMIYDVSKRPSGVPDRFSGSKSGNTASLTISGLQAEDEADYYCCSYAQGVVFGGGTKLTVL

SEQ ID NO: 453 - protein, 108 aa, synthetic construct
SSELTQDPAVSVALGQTVRITCQGDSLRSYYASWYQQKPGQAPVLLIYGKNNRPSGIPDRFSGSSSGNTASLTITGAQAEDEADYYCNSRDSSGNHWVFGGGTKLTVL

SEQ ID NO: 454 - protein, 108 aa, synthetic construct
SSELTQDPAVSVALGQTVRITCQGDSLRSYYASWYQQKPGQAPVLVIYGKNNRPSGIPDRFSGSSSGNTASLTITGAQAEDEADYYCNSRDSSGNHLVFGTGTKVTVL

SEQ ID NO: 455 - protein, 108 aa, synthetic construct; identical to SEQ ID NO: 374

SEQ ID NO: 456 - protein, 108 aa, synthetic construct
SYVLTQPPSVSVAPGKTARITCGGNNIGSKSVHWYQQKPGQAPVLVIYYDSDRPSGIPERFSGSNSGNTATLTISRVEAGDEADYYCQVWDSSSDHWVFGGGTKLTVL

SEQ ID NO: 457 - protein, 108 aa, synthetic construct; identical to SEQ ID NO: 386

SEQ ID NO: 458 - protein, 108 aa, synthetic construct; identical to SEQ ID NO: 386

SEQ ID NO: 459 - protein, 108 aa, synthetic construct
SSELTQDPAVSVALGQTVRITCQGDSLRSYYASWYQQKPGQAPVLVIYGKNNRPSGIPDRFSGSNSGNTASLTITGAQAEDEADYYCNSRDSSGNHLLFGGGTKLTVL

SEQ ID NO: 460 - protein, 108 aa, synthetic construct
SSELTQDPGVSVALGQTVRITCQGDSLRSYYASWYQQKPGQAPVLVMYGKKNRPSGIPDRFSGSSSGNTASLTITGAQAEDEADYYCKSRDSSGNHVVFGGGTKLTVL

SEQ ID NO: 461 - protein, 108 aa, synthetic construct; identical to SEQ ID NO: 369

SEQ ID NO: 462 - protein, 108 aa, synthetic construct
SSELTQDPAVSVALGQTVRITCQGDSFRNYYASWYQQMPGQAPVLVIYGKNNRPSGIPDRFSGSSSGNTASLTITGAQAEDEADYYCNSRDSSGNHWVFGGGTKLTVL

SEQ ID NO: 463 - protein, 108 aa, synthetic construct; identical to SEQ ID NO: 386

SEQ ID NO: 464 - protein, 108 aa, synthetic construct; identical to SEQ ID NO: 386

SEQ ID NO: 465 - protein, 109 aa, synthetic construct; identical to SEQ ID NO: 389

SEQ ID NO: 466 - protein, 110 aa, synthetic construct
QSALTQPASVSGSPGQSITISCTGTSSDVGVYNFVSWYQQHPGKAPKLMIYDVTKRPSGASERFSGSKSGSTASLTISGLQAEDEADYYCCSYAGSSTWVFGGGTKLTVL

SEQ ID NO: 467 - protein, 111 aa, synthetic construct
QSVLTQPPSVSGAPGQRVTISCTGSSSNIGAGYDVHWYQQLPGTAPKILIYVNNNRPSGVPDRFSGSKSGTSASLAITGLQAEDEADYYCQSYDSSLSGPVFGGGTKLTVL

SEQ ID NO: 468 - protein, 111 aa, synthetic construct
QSALTQPASVSGSPGQSITISCTGTSSDVGGYNYVSWYQQHPGKAPKLMIYDVSKRPSGVSNRFSGSKSGNTASLTISGLQAEDETDYYCCSYAGSSTYWVFGGGTKLTVL

SEQ ID NO: 469 - protein, 112 aa, synthetic construct
QSVLTQPPSVSGAPGQRVTISCTGSSSNIGAGYDVHWYQQLPGTAPKLLIYGNSNRPSGVPDRFSGSKSGTSASLAITGLQAEDEADYYCQSYDSSLSGSYVFGTGTKVTVL

SEQ ID NO: 470 - protein, 115 aa, synthetic construct
QAVLTQPASLSASPGASASLTCTLRSGIHVDTSRIYWYQQKPGSPPQYLLRYKSDSDKHQDSGVPSRFSGSKDASTNAGILLISGLQSEDEADYYCMIWHSSAIVFGGGTKLTVL

SEQ ID NO: 471 - protein, 115 aa, synthetic construct
QAVLTQPASLSASPGASASLTCTLRSGINVGSYRIYWFQQRPGSPPQYLLRYKSDSDKQQGSGVPSRFSGSKDASANAGILLISGLQSEDEADYYCMIWHSSASVFGGGTKVTVL

SEQ ID NO: 472 - protein, 115 aa, synthetic construct; identical to SEQ ID NO: 409

SEQ ID NO: 473 - protein, 108 aa, synthetic construct; identical to SEQ ID NO: 386

SEQ ID NO: 474 - protein, 108 aa, synthetic construct; identical to SEQ ID NO: 386

SEQ ID NO: 475 - protein, 108 aa, synthetic construct
SSELTQDPTVSVALGQTVRITCQGDSLRSYYASWYQQKPGQAPVLVIYGKNNRPSGIPDRFSGSSSGNTASLTITGAQAEDEADYYCNSRDSSGNHWVFGGGTKLTVL

SEQ ID NO: 476 - protein, 108 aa, synthetic construct; identical to SEQ ID NO: 386

SEQ ID NO: 477 - protein, 108 aa, synthetic construct
SSELTPDPAVSVALGQTVRITCQGDSLRSYYASWYQQKPGQAPILVIYHKNNRPSGIPDRFSGSSSGNTASLTITGAQAEDEADYYCNSRDSSGNHVVFGGGTKLTVL

SEQ ID NO: 478 - protein, 108 aa, synthetic construct; identical to SEQ ID NO: 386

SEQ ID NO: 479 - protein, 108 aa, synthetic construct; identical to SEQ ID NO: 369

SEQ ID NO: 480 - protein, 110 aa, synthetic construct
QSALTQPPSASGSPGQSVTISCTGTSSDVGGYNYVSWYQQHPGKAPKLMIYEVSKRPSGVPDRFSGSKSGNTASLTVSGLQAEDEADYYCSSYAGSNNVVFGGGTKLTVL

SEQ ID NO: 481 - protein, 110 aa, synthetic construct; identical to SEQ ID NO: 341

SEQ ID NO: 482 - protein, 110 aa, synthetic construct
QTVVTQEPSLTVSPGGTVTLTCASSTGAVTSGYYPNWFQQKPGQAPRALIYSTSNKHSWTPARFSGSLLGGKAALTLSGVQPEDEAEYYCLLYYGGAQLVFGGGTKLTVL

SEQ ID NO: 483 - protein, 111 aa, synthetic construct
QSVLTQPPSVSGAPGQRVTISCTGSNSNIGAGYDIHWYQQLPVTAPKLLIYGNSNRPSGVPDRFSGSKSGSSASLAITGLQAEDEADYYCQSYDNSLSGSVFGGGTKLTVL

SEQ ID NO: 484 - protein, 106 aa, synthetic construct
SYELTQPSSVSVSPGQTARITCSGDVLAKKFARWFQQKPGQAPLLVIYKDSERPSGIPERFSGSNSGTTVTLTISGAQVEDEADYYCYSAADNNLVFGGGTKLTVL

SEQ ID NO: 485 - protein, 108 aa, synthetic construct; identical to SEQ ID NO: 369

SEQ ID NO: 486 - protein, 108 aa, synthetic construct
SHMLTQPPSVSVAPGTTARITCGGNNFGSKSVHWYQQKPGQAPVLVIYYDSDRPSGIPERFSGSNSGNTATLTISRVEAGDEADYYCQVWDSTSDHYVFGTGTKVTVL

SEQ ID NO: 487 - protein, 110 aa, synthetic construct
QSALTQPASVSGSPGQSITISCTGTSSDVGAYNYVSWYQQHPGKAPKLMIYAVSKRPSGVSYRFSGSKSGNTASLTISGLQAEDEADYYCCSYAGTISWVFGGGTKLTVL

SEQ ID NO: 488 - protein, 110 aa, synthetic construct; identical to SEQ ID NO: 441

SEQ ID NO: 489 - protein, 110 aa, synthetic construct
QSALTQPPSASGSPGQSVTISCTGTSSDVGGYNYVSWYQQHPGKAPKLMIYEVNKRPSGVPDRLSGSKSGNTASLTVSGLQAEDEADYYCSSYAGSNNWVFGGGTKLTVL

SEQ ID NO: 490 - protein, 110 aa, synthetic construct; identical to SEQ ID NO: 391

SEQ ID NO: 491 - protein, 111 aa, synthetic construct
QSVLTQPPSVSGAPGQRVTISCTGSSSNIGAGYDVHWYQQLPGTAPKLLIYGNSNRPSGVPDRFSGSKSGTSASLAITGLQAEDEADYYCQSYDSSLSGWVFGGGTKLTVL

SEQ ID NO: 492 - protein, 111 aa, synthetic construct
QSALTQPPSVSGSPGQSVTISCTGTSSDVGSYNRVSWYQQPPGTAPKLMIYDVSNRPSGVPDRFSGSKSGNTASLTISGLQAEDEADYYCSSYTSSSTYVVFGGGTKLTVL

SEQ ID NO: 493 - protein, 112 aa, synthetic construct
QSILTQPPSVSATPGQRVTISCTGSDSNIGAGYDVHWYQQLPGAVPRLLIHDNIIRPSGVPDRFSGSKSDTSASLAISGLHAEDEADYYCQSYDISLSGSVVFGGGTKLTVL

SEQ ID NO: 494 - protein, 106 aa, synthetic construct
SYELTQPPSVSVSPGQTASITCSGDKLGDKYACWYQQKPGQSPVLVIYQDSKRPSGIPERFSGSNSGNTATLTISGTQAMDEADYYCQAWDSSTAVFGGGTKLTVL

SEQ ID NO: 495 - protein, 106 aa, synthetic construct
SYELTQPPSVSVSPGQTARITCSGDGLSKKYAYWYQQKSGQAPVLVIYEDSKRPSGIPERFSGSSSGTMATLTVSGAQVEDEADYYCYSTDSSGKIFGGGTKLTVL

SEQ ID NO: 496 - protein, 108 aa, synthetic construct; identical to SEQ ID NO: 374

SEQ ID NO: 497 - protein, 108 aa, synthetic construct; identical to SEQ ID NO: 374

SEQ ID NO: 498 - protein, 108 aa, synthetic construct; identical to SEQ ID NO: 369

SEQ ID NO: 499 - protein, 108 aa, synthetic construct; identical to SEQ ID NO: 374

SEQ ID NO: 500 - protein, 108 aa, synthetic construct; identical to SEQ ID NO: 386

SEQ ID NO: 501 - protein, 108 aa, synthetic construct; identical to SEQ ID NO: 374

SEQ ID NO: 502 - protein, 110 aa, synthetic construct; identical to SEQ ID NO: 442

SEQ ID NO: 503 - protein, 110 aa, synthetic construct; identical to SEQ ID NO: 391

SEQ ID NO: 504 - protein, 108 aa, synthetic construct
SSELTQDPAVSVALGQTVRITCQGDSLRSYYATWYQQKPGQAPVLVIYGRNNRPSGIPDRFSGSSSGNTASLTITGAQAEDEADYYCYSRDSSGNHLVFGGGTNLTVL

SEQ ID NO: 505 - protein, 108 aa, synthetic construct
SYVLTQPPSVSVAPGKTARITCGGNNIGSKSVHWYQQKPGQAPVLVIYYDSDRPSGIPERFSGSNSGNTATLTISRVEAGDEADYYCQVWDSSSDHRVFGGGTKLTVL

SEQ ID NO: 506 - protein, 108 aa, synthetic construct; identical to SEQ ID NO: 386

SEQ ID NO: 507 - protein, 108 aa, synthetic construct
SSELTQDPAVSVALGQTVRITCQGDSLRSYYASWYQQKPGQAPVLVFYGKNKRPSGIPDRFSGSSSGNTASLTITGAQAEDEADYYCNSRDSNGNHWVFGGGTKLSVL

SEQ ID NO: 508 - protein, 109 aa, synthetic construct
QSALTQPASVSGSPGQSITISCTGTSSDVGGYNYVSWYQQHPGKAPKLMIYDVSKRPSGVSNRFSGSKSGNTASLTISGLQAEDEADYYCCSYAGSSWVFGGGTKLTVL

SEQ ID NO: 509 - protein, 111 aa, synthetic construct
QPVLTQPPSVSGVPGQRVTISCTGSSSNIGARYDVHWYQQLPGTAPKLLIYGNSNRPSGVPDRFSGSKSGTSASLAITGLQAEDEADYYCQSYDGTLGGWIFGGGTNLTVL

SEQ ID NO: 510 - protein, 108 aa, synthetic construct; identical to SEQ ID NO: 374

SEQ ID NO: 511 - protein, 109 aa, synthetic construct; identical to SEQ ID NO: 508

SEQ ID NO: 512 - protein, 106 aa, synthetic construct
SYELTQPPSVSVSPGQTASITCSGDKLGDKYACWYQQKPGQSPVLVIYQDSKRPSGIPERFSGSNSGNTATLTISGTQAMDEADYYCQAWDSSTVIFGGGTKLTVL

SEQ ID NO: 513 - protein, 108 aa, synthetic construct
SYELTQPPSVSVSPGQTARITCSGDALPKKYAYWYQQKSGQAPVLVIYEDNKRPSGIPERFSGSSSGTMATLTISGAQVEDEADYYCYSTDSSGNHRVFGGGTKLTVL

SEQ ID NO: 514 - protein, 108 aa, synthetic construct
SSELTQDPAVSVALGQTVRITCQGDSLRNYYASWYQQKPGQAPVIVIYGKNNRPSGIPDRFSGSSSGNTASLTITGAQAEDEADYYCNSRDSSGNHLVFGGGTKLTVL

SEQ ID NO: 515 - protein, 108 aa, synthetic construct
QSALTQPPSASGSPGQSVTISCTGTSSDVGGYNYVSWYQQHPGKAPKLMIYEVSKRPSGVPDRFSGSKSGNTASLTVSGLQAEDEADYYCSSYAGSNNFGGGTKLTVL

SEQ ID NO: 516 - protein, 108 aa, synthetic construct
SSELTQDPAVSVALGQTVRITCQGDSLRTYYASWYQQKPGQAPVLVIYGKNKRPSGIPDRFSGSSSGNTASLTITGAQAEDEADYYCNSRDSSGNHWVFGGGTKLTVL

SEQ ID NO: 517 - protein, 108 aa, synthetic construct
SYVLTQPPSVSVAPGQTARIICGGDNIGIKNVHWYQQKPGQAPVLVIYDDSDRPSGIPERFSGSNSGNTATLTISRVEAGDEADYCCQVWDSSSDHVVFGGGTKLTVL

SEQ ID NO: 518 - protein, 106 aa, synthetic construct
SYELTQPPSVSVSPGQTASITCSGDKLGDKYTCWYQQKPGQSPVLVIYQDIKRPSGIPDRFSGSNSGNTATLTISGTQAMDEADYYCQAWDSSTVVFGGGTKLTVL

SEQ ID NO: 519 - protein, 108 aa, synthetic construct; identical to SEQ ID NO: 344

SEQ ID NO: 520 - protein, 110 aa, synthetic construct; identical to SEQ ID NO: 403

SEQ ID NO: 521 - protein, 110 aa, synthetic construct; identical to SEQ ID NO: 349

SEQ ID NO: 522 - protein, 109 aa, synthetic construct; identical to SEQ ID NO: 439

SEQ ID NO: 523 - protein, 118 aa, synthetic construct
QLQLQESGPGLVKPSETLSLTCTVSGGSISSSSYYWGWIRQPPGKGLEWIGSIYYSGSTYYNPSLKSRVTISVDTSKNQFSLKLSSVTAADTAVYYCASLTGDRFDYWGQGTLVTVSS

SEQ ID NO: 524 - protein, 122 aa, synthetic construct
EVQLVESGGGLVKPGGSLRLSCAASGFTFSNAWMSWVRQAPGKGLEWVGRIKSKTDGGTTDYAAPVKGRFTISRDDSKNTLYLQMNSLKTEDTAVYYCTGRPSIAARHFDYWGQGTLVTVSS

SEQ ID NO: 525 - protein, 124 aa, synthetic construct
EVQLVESGGGVVRPGGSLRLSCAASGFTFDDYGMSWVRQAPGKGLEWVSGINWNGGSTGYADSVKGRFTISRDNAKNSLYLQMNSLRAEDTALYYCARERLTIFGVVNYYMDVWGKGTTVTVSS

SEQ ID NO: 526 - protein, 114 aa, synthetic construct
EVQLVESGGGLVQPGGSLRLSCAASGFTFSSYSMNWVRQAPGKGLEWVSYISSSSSTIYYADSVKGRFTISRDNAKNSLYLQMNSLRDEDTAVYYCARDGWDYWGQGTLVTVSS

SEQ ID NO: 527 - protein, 120 aa, synthetic construct
EVQLVESGGGLVQPGGSLKLSCAASGFTFSSSDMHWVRQTTGKGLEWVSAIYTTGDTYYPGSVKGRFTISRENAKNSLYLQMNSLRAGDTAVYYCARGYSGSYYGDFDYWGQGTLVTVSS

SEQ ID NO: 528 - protein, 119 aa, synthetic construct
EVQLVESGGGLVQPGGSLRLSCAASGFTFSSYAMSWVRQAPGKGLEWVSAISGSGGSTYYADSVKGRFTISRDNSKNTLYLQMNSLRAEDTAVYYCAKKPPRDSAFDYWGQGTLVTVSS

SEQ ID NO: 529 - protein, 120 aa, synthetic construct
QVQLVQSGAEVKKPGASVKVSCKASGYTFTSYGISWVRQAPGQGLEWMGWISAYNGNTNYAQKLQGRVTMTTDTSTSTAYMELRSLRSDDTAVYYCARENSGSYYWFDPWGQGTLVTVSS

SEQ ID NO: 530 - protein, 117 aa, synthetic construct
EVQLVESGGGLVQPGGSLRLSCAASGFTFSSYAMSWVRQAPGKGLEWVSAISGSGGSTYYADSVKGRFTISRDNSKNTLYLQMNSLRAEDTAVYYCAKLEYSSPDYWGQGTLVTVSS

SEQ ID NO: 531 - protein, 122 aa, synthetic construct
QVQLQQWGAGLLKPSETLSLTCAVYGGSFSGYYWSWIRQPPGKGLEWIGEINHSGSTNYNPSLKSRVTISVDTSKNQFSLKLSSVTAADTAVYYCAREGLLVGATLDAFDIWGQGTMVTVSS

SEQ ID NO: 532 - protein, 122 aa, synthetic construct; identical to SEQ ID NO: 157

SEQ ID NO: 533 - protein, 125 aa, synthetic construct
QVQLVQSGAEVKKPGASVKVSCKASGYTFTSYGISWVRQAPGQGLEWMGWISAYNGNTNYAQKFQGRVTMTTDTSTNTAYMELRSLRSDDKAVFYCARDRTGISAAGPSNWFDPWGQGTLVTVSS

SEQ ID NO: 534 - protein, 118 aa, synthetic construct
QVQLQQWGAGLLKPSETLSLTCAVYGGSFSGYYWSWIRQPPGKGLEWIGEINHSGSTNYNPSLKSRVTISVDTSKNQFSLKLSSVTAADTAVYYCARTSLAAADFDYWGQGTLVTVSS

SEQ ID NO: 535 - protein, 121 aa, synthetic construct
EVQLVESGGGLIQPGGSLRLSCAASGFTVSSNYMSWVRQAPGKGLEWVSVIYSGGSTYYADSVKGRFTISRDNSKNTLYLQMNSLRAEDTAVYYCARAPDYYGSGSLFDYWGQGTLVTVSS

SEQ ID NO: 536 - protein, 116 aa, synthetic construct
EVQLVESGGGLVKPGGSLRLSCIASGFTFSTYSMNWVRQAPGKGLEWVSSISGSSSYIYYSDSVKGRFTISRDNAKNSLYLQLNSLRAEDTAVYYCASHWGHFDYWGRGTLVTVSS

SEQ ID NO: 537 - protein, 114 aa, synthetic construct
EVQLVESGGGLVQPGGSLRLSCAASGFTFSSYDMHWVRQATGKGLEWVSAIGTAGDTYYPGSVKGRFTISRENAKNSLYLQMNSLRAGDTAVYYCARDRTLDYWGQGTLVTVSS

SEQ ID NO: 538 - protein, 114 aa, synthetic construct; identical to SEQ ID NO: 178

SEQ ID NO: 539 - protein, 115 aa, synthetic construct
EVQLVESGGGLVQTGGSLKLSCAASGFTFSVSPIHWVRQASGKGLEWVGRIRSKANSYATAYGASVKGRFTISRDDSKNTAYLQMNSLKTEDTAVYYCTGPFDNWGQGTLVTVSS

SEQ ID NO: 540 - protein, 115 aa, synthetic construct
EVQLVESGGGLVKPGGSLRLSCAASGFTFSNAWMSWVRQAPGKGLEWVGRIKSKTDGGTTDYTAPVKGRFTISRDDSKNTLYLQMNSLRTEDTAVYYCTTGGHYWGQGTLVTVSS

SEQ ID NO: 541 - protein, 115 aa, synthetic construct
EVQLVESGGGLVQPGRSLRLSCAASGFTFDDYAMHWVRQAPGKGLEWVSGISWNSGSIGYADSVKGRFTISRDNAKNSLYLQMNSLRAEDTALYYCAKARSFDIWGQGTMVTVSS

SEQ ID NO: 542 - protein, 115 aa, synthetic construct
EVQLVESGGGLVKPGGSLRLSCAASGFTFSDAWMYWDRQAPGKGLEWVGRIKSKTDGGTTDYAAPVKGRFTISRDDSKNTLYLQMNSLKTEDTAVYYCRADMDVWGKGTTVTVSS

SEQ ID NO: 543 - protein, 115 aa, synthetic construct
EVQLVESGGGVVRPGGSLRLSCAASGFTFDDYGMSWVRQAPGKGLEWVSGINWNGGSTGYADSVKGRFTISRDNAKNSLYLQMNSLRAEDTALYYCARDRGFDYWGQGTLVTVSS

SEQ ID NO: 544 - protein, 115 aa, synthetic construct
EVQLVESGGGLIQPGGSLRLSCAASGFTVSSNYMSWVRQAPGKGLEWVSVIYSGGSTYYADSVKGRFTISRDNSKNTLYLQMNSLRAEDTAVYYCARGGDYFDYWGQGTLVTVSS

SEQ ID NO: 545 - protein, 115 aa, synthetic construct
QVQLVQSGAEVKKPGASVKVSCKTSGYTFTSFGISWVRQAPGQGLEWMGWISAYNDNINYAQKLQDRVTMTTDTSTSTACMELRSLRSDDTAVYFCARGASFDFWGQGTLVTVSS

SEQ ID NO: 546 - protein, 115 aa, synthetic construct
EVQLVESGGGLVQPGGSLKLSCAASGFTFSGSAMHWVRQASGKGLEWVGRIRSKANSYATAYAASVKGRFTISRDDSKNTAYLQMNSLKTEDTAVYYCTGPFDYWGQGTLVTVSS

SEQ ID NO: 547 - protein, 115 aa, synthetic construct
EVQLVESGGGLIQPGGSLRLSCAASGFTVSSNYMSWVRQAPGKGLEWVSVIYSGGSTYYADSVKGRFTISRDNSKNTLYLQMNSLRAEDTAVYYCARSFDAFDIWGQGTMVTVSS

SEQ ID NO: 548 - protein, 116 aa, synthetic construct
EVQLVESGGGLVKPGGSLRLSCAASGFTFSSYSMNWVRQAPGKGLEWVSSISSSSSYIYYADSVKGRFTISRDNAKNSLYLQMNSLRAEDTAVYYCAGLTGELDYWGQGTLVTVSS

SEQ ID NO: 549 - protein, 116 aa, synthetic construct
EVQLVESGGGLVQPGGSLRLSCAASGFTFSSYDMHWVRQATGKGLEWVSAIGTAGDTYYPGSVKGRFTISRENAKNSLYLQMNSLRAGDTAVYYCARWGTGGFDYWGQGTLVTVSS

SEQ ID NO: 550 - protein, 116 aa, synthetic construct
EVQLVESGGGLVKPGGSLRLSCAASGFTFSSYSMNWVRQAPGKGLEWVSSISSSSSYIYYADSVKGRFTISRDNAKNSLYLQMNSLRAEDTAVYYCARREGFFDYWGQGTLVTVSS

SEQ ID NO: 551 - protein, 116 aa, synthetic construct
EVQLVESGGGLVQPGGSLRLSCAASGFTFSSYWMSWVRQAPGKGLEWVANIKQDGSEKYYVDSVKGRFTISRDNAKNSLYLQMNSLRAEDTAVYYCARDQLAPDYWGQGTLVTVSS

SEQ ID NO: 552 - protein, 116 aa, synthetic construct
EVQLVESGGGLVQPGGSLRLSCAASGFTFSSYAMSWVRQAPGKGLEWVSAISGSGGSTYYADSVKGRFTISRDNSKNTLYLQMNSLRAEDTAVYYCAKDSSGFDYWGQGTLVTVSS

SEQ ID NO: 553 - protein, 116 aa, synthetic construct
EVQLVESGGGLVQPGGSLRLSCAASGFTFSSYAMSWVRQAPGKGLEWVSAISGSGGSTYYADSVKGRFTISRDNSKNTLYLQMNSLRAEDTAVYYCAKDPQFFDYWGQGTLVTVSS

SEQ ID NO: 554 - protein, 116 aa, synthetic construct
EVQLVESGGGLVQPGGSLRLSCAASGFTFSSYAMSWVRQAPGKGLEWVSAISGSGGSTYYADSVKGRFTISRDNSKNTLYLQMNSLRAEDTAVYYCAKDGTAFDIWGQGTMVTVSS

SEQ ID NO: 555 - protein, 117 aa, synthetic construct
QVQLVESGGGVVQPGRSLRLSCAASGFTFSSYGMHWVRQAPGKGLEWVAVIWYDGSNKYYADSVKGRFTISRDNSKNTLYLQMNSLRAEDTAVYYCARDRGWGLDYWGQGTLVTVSS

SEQ ID NO: 556 - protein, 117 aa, synthetic construct
QVQLVESGGGVVQPGRSLRLSCAASGFPFSNSGMHWVRQAPGKGLEWVTIISYDGNSKYYADSVKGRFTISRDNSKNTLYLQMNSLRTEDTAVYYCARGELGDFDYWGRGTLVTVSS

SEQ ID NO: 557 - protein, 117 aa, synthetic construct
QVQLVQSGAEVKKPGASVKVSCKASGYTFTGYYMHWVRQAPGQGLEWMGWINPNSGGTNYAQKFQGRVTMTRDTSISTAYMELSRLRSDDTAVYYCARVLELYFDYWGQGTLVTVSS

SEQ ID NO: 558 - protein, 117 aa, synthetic construct
EVQLVESGGGLVKPGGSLRLSCAASGFTFSNAWMSWVRQAPGKGLEWVGRIKSKTDGGTTDYAAPVKGRFTISRDDSKNTLYLQMNSLKTEDTAVYYCTTRSDFQHWGQGTLVTVSS

SEQ ID NO: 559 - protein, 118 aa, synthetic construct
QVQLVQSGAEVKKPGASVKVSCKASGYTFTSYDINWVRQATGQGLEWMGWMNPNSGNTGYAQKFQGRVTMTRNTSISTAYMELSSLRSEDTAVYYCARDQELRVFDYWGQGTLVTVSS

SEQ ID NO: 560 - protein, 118 aa, synthetic construct
QVQLVESGGGVVQPGRSLRLSCAASGFTFSSYGMHWVRQAPGKGLEWVAVISYDGSNKYYADSVKGRFTISRDNSKNTLYLQMNSLRAEDTAVYYCAKASGYGPFDYWGQGTLVTVSS

SEQ ID NO: 561 - protein, 118 aa, synthetic construct
EVQLVQSGAEVKKPGESLKISCKGSGYSFTSYWIGWVRQMPGKGLEWMGIIYPGDSDTRYSPSFQGQVTISADKSISTAYLQWSSLKASDTAMYYCARHSSSSHFDYWGQGTLVTVSS

SEQ ID NO: 562 - protein, 118 aa, synthetic construct
EVQLVESGGGLVKPGGSLRLSCAASGFTFSSYSMNWVRQAPGKGLEWVSSISSSSSYIYYADSVKGRFTISRDNAKNSLYLQMNSLRAEDTAVYYCARDRGNSLFDYWGQGTLVTVSS

SEQ ID NO: 563 - protein, 118 aa, synthetic construct
QVQLVQSGAEVKKPGASVKVSCKASGYTFTGYYMHWVRQAPGQGLEWMGWINPNSGGTNYAQKFQGRVTMTRDTSISTAYMELSRLRSDDTAVYYCARDKSLEWFDYWGQGTLVTVSS

SEQ ID NO: 564 - protein, 118 aa, synthetic construct
EVQLVESGGGLVQPGGSLRLSCAASGFTFSSYDMHWVRQATGKGLEWVSAIGTAGDTYYPGSVKGRFTISRENAKNSLYLQMNSLRAGDTAVYYCARGDWNYGGFDYWGQGTLVTVSS

SEQ ID NO: 565 - protein, 118 aa, synthetic construct
EVQLVESGGGLVKPGGSLRLSCAASGFTFSNAWMSWVRQAPGKGLEWVGRIKSKTDGGTTDYAAPVKGRFTISRDDSKNTLYLQMNSLKTEDTAVYYCTTAPDAFDIWGQGTMVTVSS

SEQ ID NO: 566 - protein, 118 aa, synthetic construct
EVQLVESGGGLVQPGGSLRLSCAASGFTFSSYAMSWVRQAPGKGLEWVSAISGSGGSTYYADSVKGRFTISRDNSKNTLYLQMNSLRAEDTAVYYCASGITGTTGDYWGQGTLVTVSS

SEQ ID NO: 567 - protein, 118 aa, synthetic construct
EVQLVESGGGLVQPGGSLRLSCAASGFTFSSYAMSWVRQAPGKGLEWVSAISGSGGSTYYADSVKGRFTISRDNSKNTLYLQMNSLRAEDTAVYYCAKEGAHDAFDIWGQGTMVTVSS

SEQ ID NO: 568 - protein, 118 aa, synthetic construct
EVQLVESGGGLVQPGGSLRLSCAASGFTFSSYAMSWVRQAPGKGLEWVSAISGSGGSTYYADSVKGRFTISRDNSKNTLYLQMNSLRAEDTAVYYCAKDKGELPFDYWGQGTLVTVSS

SEQ ID NO: 569 - protein, 118 aa, synthetic construct
QVQLVESGGGVVQPGRSLRLSCAASGFTFSSYGMHWVRQAPGKGLEWVAVIWYDGSNKYYADSVKGRFTISRDNSKNTLYLQMNSLRAEDTAVYYCAKLGVRDYMDVWGKGTTVTVSS

SEQ ID NO: 570 - protein, 118 aa, synthetic construct
EVQLVESGGGVVRPGGSLRLSCAASGFTFDDYGMSWVRQAPGKGLEWVSGINWNGGSTGYADSVKGRFTISRDNAKNSLYLQMNSLRAEDTALYYCAREGGGWVFDYWGQGTLVTVSS

SEQ ID NO: 571 - protein, 118 aa, synthetic construct
EVQLVQSGAEVKKPGESLKISCKGSGYSFTSYWIGWVRQMPGKGLEWMGIIYPGDSDTRYSPSFQGQVTISADKSISTAYLQWSSLKASDTAMYYCARGGGGDPFDYWGQGTLVTVSS

SEQ ID NO: 572 - protein, 118 aa, synthetic construct
QVQLVQSGAEVKKPGASVQVSCKASGYTFTGYYIHWVRQAPGQGLEWMGWINPNSGGTNYAQKFQGRVIMTRDTSISIAYIELSRLRSDDTAVYYCARPYNWNSFDYWGQGTLVTVSS

SEQ ID NO: 573 - protein, 118 aa, synthetic construct
EVQLVESGGDLVQPGRSLRLSCAASGFTFDDHAIHWVRQAPGKGLEWVSGVTWNSNIIGYADSVKGRFTISRDIAKNSLYLQMNSLRPEDTALYYCAKDNDWNGFDYWGQGTLVTVSS

SEQ ID NO: 574 - protein, 118 aa, synthetic construct
EVQLVESGGGLVQPGRSLRLSCAASGFTFDDYAMHWVRQAPGKGLEWVSGISWNSGSIGYADSVKGRFTISRDNAKNSLYLQMNSLRAEDTALYYCAKDNWNYAFDIWGQGTMVTVSS

SEQ ID NO: 575 - protein, 118 aa, synthetic construct
EVQLVESGGGLVQPGGSLRLSCTASGFTFSSYWMHWVRQAPGKGLVWVSRVNSDGGNTIYADSVKGRFTISRDNAKNTLYLQMNSLRAEDTAIYYCARDLDWTLFDYWGQGTLVTVSS

SEQ ID NO: 576 - protein, 119 aa, synthetic construct
EVQLVESGGGLVQPGGSLRLSCAASGFTFSSYWMSWVRQAPGKGLEWVANIKQDGSEKYYVDSVKGRFTISRDNAKNSLYLQMNSLRAEDTAVYYCAGDYSNYGWFDPWGQGTLVTVSS

SEQ ID NO: 577 - protein, 119 aa, synthetic construct
QVQLVQSGAEVKKPGASVKVSCKASGYTFTSYDINWVRQATGQGLEWMGWMNPNSGNTGYAQKFQGRVTMTRNTSISTAYMELSSLRSEDTAVYYCARARDSGYYMDVWGKGTTVTVSS

SEQ ID NO: 578 - protein, 119 aa, synthetic construct
QVQLVESGGGVVQPGRSLRLSCAASGFTFSSYGMHWVRQAPGKGLEWVAVIWYDGSNKYYADSVKGRFTISRDNSKNTLYLQMNSLRAEDTAVYYCARATAMVTGIDYWGQGTLVTVSS

SEQ ID NO: 579 - protein, 119 aa, synthetic construct
EVQLVESGGGLVQPGGSLKLSCAASGFTFSGSAMHWVRQASGKGLEWVGRIRSKANSYATAYAASVKGRFTISRDDSKNTAYLQMNSLKTEDTAVYYCTGSSGSYFDYWGQGTLVTVSS

SEQ ID NO: 580 - protein, 119 aa, synthetic construct
EVQLVESGGGLVKPGGSLRLSCAASGFTFSSYSMNWVRQAPGKGLEWVSSISSSSSYIYYADSVKGRFTISRDNAKNSLYLQMNSLRAEDTAVYYCARSPYNWNYVDYWGQGTLVTVSS

SEQ ID NO: 581 - protein, 119 aa, synthetic construct
QVQLVQSGAEVKKPGASVKVSCKVSGYTLTELSMHWVRQAPGKGLEWMGGFDPEDGETIYAQKFQGRVTMTEDTSTDTAYMDLSSLRSEDTAVYYCATEGPSTFSFDYWGQGTLVTVSS

SEQ ID NO: 582 - protein, 119 aa, synthetic construct
QVQLVQSGAEVKKPGASVKVSCKVSGYTLTELSMHWVRQAPGKGLEWMGGFDPEDGETIYAQKFQGRVTMTEDTSTDTAYMDLSSLRSEDTAVYYCATANWNDEAFDIWGQGTMVTVSS

SEQ ID NO: 583 - protein, 119 aa, synthetic construct
EVQLVESGGGLVQPGGSLRLSCAASGFTFSSYSMNWVRQAPGKGLEWVSYISSSSSTIYYADSVKGRFTISRDNAKNSLYLQMNSLRDEDTAVYYCARDELTGDAFDIWGQGTMVTVSS

SEQ ID NO: 584 - protein, 119 aa, synthetic construct
EVQLVESGGGLVKPGGSLRLSCAASGFTFSNAWMSWVRQAPGKGLEWVGRIKSKTDGGTTDYAAPVKGRFTISRDDSKNTLYLQMNSLKTEDTAVYYCTTEALGIFDYWGQGTLVTVSS

SEQ ID NO: 585 - protein, 119 aa, synthetic construct
EVQLVESGGGLVKPGGSLRLSCAASGFTFSSYSMNWVRQAPGKGLEWVSSISSSSSYIYYADSVKGRFTISRDNAKNSLYLQMNSLRAEDTAVYYCARDGSSGFLFDYWGQGTLVTVSS

SEQ ID NO: 586 - protein, 119 aa, synthetic construct
EVQLVESGGGLVQPGGSLRLSCAASGFTFSSYAMSWVRQAPGKGLEWVSAISGSGGSTYYADSVKGRFTISRDNSKNTLYLQMNSLRAEDTAVYYCAKHYYDSRSFDYWGQGTLVTVSS

SEQ ID NO: 587 - protein, 119 aa, synthetic construct
QVQLQESGPGLVKPSGTLSLTCAVSGGSISSSDWWTWVRQPPGRGLEWIGEINHSGTTNYNPSLKSRVTISVDKSKNQFSLKLSSVTAADTAVYYCARDFQGTGPFDYWGQGTLVTVSS

SEQ ID NO: 588 - protein, 120 aa, synthetic construct
QVQLQQWGAGLLKPSETLSLTCAVFGGSFSGYYWSWIRQPPGKGLEWIGEINHSGSTNYNPSLKSRVTISVDTSKNQFSLKLTSVTAADTTVYYCARGRLYSGSFSFDYWGQGTLVTVSS

SEQ ID NO: 589 - protein, 120 aa, synthetic construct
EVQLVESGGGLVQPGGSLRLSCAASGFTFSSYWMSWVRQAPGKGLEWVANIKQDGSEKYYVDSVKGRFTISRDNAKNSLYLQMNSLRAEDTAVYYCARDGGYNWNFFDYWGQGTLVTVSS

SEQ ID NO: 590 - protein, 120 aa, synthetic construct
QITLKESGPMLVKPTQTLTLTCTFSGFSLSTSGVGVGWIRQPPGKALEWLALIYWNDDKRYSPSLKSRLTITRDTSKNQVVLTMTNMDPVDTATYYCTHRDAAMVYFDYWGQGTLVTVSS

SEQ ID NO: 591 - protein, 120 aa, synthetic construct
QVQLVQSGAEVKKPGASVKVSCKASGYTFTSYGISWVRQAPGQGLEWMGWISAYNGNTNYAQKLQGRVTMTTDTSTSTAYMELRSLRSDDTAVYYCARWYYGSGSYFDYWGQGTLVTVSS

SEQ ID NO: 592 - protein, 120 aa, synthetic construct
EVQLVESGGGLVQPGGSRRLSCAASGFTFSRYDMHWVRQGTGKGLEWVSGINTAGDTYYSGSVKGRFTISRENAKNSLHLQMNSLRAGDTAVYYCARGWNYGSGSCFDNWGQGTLVTVSS

SEQ ID NO: 593 - protein, 120 aa, synthetic construct
EVQLVESGGGLVQPGGSLRLSCAASGFTFSSSDMHWVRQAPGEGLEWVSAIYTTGDTYYPGSVQGRFTISRENAKNSLYLQMNSLRAGDTAVYYCARGFSGTYYGDFDYWGQGTLVTVSS

SEQ ID NO: 594 - protein, 120 aa, synthetic construct
EVQLVESGGGLVQPGGSLRLSCAASGFTFSSYSMNWVRQAPGKGLEWVSYISSSSSTIYYADSVKGRFTISRDNAKNSLYLQMNSLRDEDTAVYYCAREGEWEPLHMDVWGKGTTVTVSS

SEQ ID NO: 595 - protein, 120 aa, synthetic construct
EVQLVESGGGLVQPGGSLRLSCAASGFTFSSYAMSWVRQAPGKGLEWVSAISGSGGSTYYADSVKGRFTISRDNSKNTLYLQMNSLRAEDTAVYYCAKSLSGSYVYMDVWGKGTTVTVSS

SEQ ID NO: 596 - protein, 120 aa, synthetic construct
QVQLVESGGGVVQPGRSLRLSCAASGFTFSSYGMHWVRQAPGKGLEWVAVISYDGSNKYYADSVKGRFTISRDNSKNTLYLQMNSLRAEDTAVYYCAKGFLEWLLGFDYWGQGTLVTVSS

SEQ ID NO: 597 - protein, 120 aa, synthetic construct
QVQLVESGGGLVKPGGSLRLSCAASGFTFSDYYMSWIRQAPGKGLEWVSYISSSGSTIYYADSVKGRFTISRDNSKNTLYLQMNSLRAEDTAVYYCARDGGSSGYYSDYWGQGTLVTVSS

SEQ ID NO: 598 - protein, 120 aa, synthetic construct
EVQLVESGGGLVQPGGSLRLSCAASGFTFSEYWMHWVRQAPGKGLVWVARINSDGSRTDYADSVKGRFTISRNNAKNRLNLQIDSLRAEDTAVYYCTRDLVYSSGWYDYWGQGTLVTVSS

SEQ ID NO: 599 - protein, 120 aa, synthetic construct
EVQLVESGGGLVQPGGSLRLSCAASGFTFSSYWMHWVRQAPGKGLVWVSRINSDGSGTSYADSVKGRFTISRDNAKNTLYLQMNSLRAEDTAVYYCAREGIKASDAFDIWGQGTMVTVSS

SEQ ID NO: 600 - protein, 120 aa, synthetic construct
EVQLVESGGGLVQPGRSLRLSCAASGFTFDDYAMHWVRQAPGKGLEWVSGISWNSGSIGYADSVKGRFTISRDNAKNSLYLQMNSLRAEDTALYYCAKDIDPSITGTDYWGQGTLVTVSS

SEQ ID NO: 601 - protein, 120 aa, synthetic construct
QVQLVESGGGLVKPGGSLRLSCAASGFTFSDYYMSWIRQAPGKGLEWVSYISHSGTTVYYADSVKGRFTISRDNAKISLYLQMNSLRAEDTAVYYCAGLRHFDWLGFDSWGQGTLVTVSS

SEQ ID NO: 602 - protein, 120 aa, synthetic construct
EVQLVESGGGLVQPGGSLRLSCAASGFTFSSYAMNWVRQAPGKGLEWVSIINDSGYSTYYADSVKGRFTISRDNSKNTLYLQMNSLRAEDTALYYCAKEDNWNYGWFDPWGQGTLVTVSS

SEQ ID NO: 603 - protein, 120 aa, synthetic construct
EVQLVESGGGLVQPGGSLRLSCAASGFTFSSYDMHWVRQATGKGLEWVSAIGTAGDTYYPGSVKGRFTISRENAKNSLYLQMNSLRAGDTAVYYCAREETGTTSWYFDLWGRGTLVTVSS

SEQ ID NO: 604 - protein, 120 aa, synthetic construct
EVQLVESGGGLVQPGGSLRLSCAASGFTFSSYSMNWVRQAPGKGLEWVSYISSSSSTIYYADSVKGRFTISRDNAKNSLYLQMNSLRDEDTAVYYCARGYSYGYWYFDLWGRGTLVTVSS

SEQ ID NO: 605 - protein, 121 aa, synthetic construct
QVQLVQSGAEVKKPGASVKVSCKVSGYTLTELSMHWVRQAPGKGLEWMGGFDPEDGETIYAQKFQGRVTMTEDTSTDTAYMDLSSLRSEDTAVYYCATPYCSGGSCHFDYWGQGTLVTVSS

SEQ ID NO: 606 - protein, 121 aa, synthetic construct
EVQLVESGGGLVKPGGSLRLSCAASGFTFSSYSMNWVRQAPGKGLEWVSSISSSSSYIYYADSVKGRFTISRDNAKNSLYLQMNSLRAEDTAVYYCARDDYGGNSVYFDYWGQGTLVTVSS

SEQ ID NO: 607 - protein, 121 aa, synthetic construct
QVQLVESGGGAVQPGRSLRLSCVASGFTFSNYDMHWVRQAPGKGLEWVAVIWSDGSNKYYSDSVKGRFTISRDNSKNTLYLQMTSLSAEDSALSYCVRAARYSGTYIFDYWGQGTLVTVSS

SEQ ID NO: 608 - protein, 121 aa, synthetic construct
EVQLVESGGGLVKPGGSLRLSCAASGFTFSNAWMSWVRQAPGKGLEWVGRIKSKTDGGTTDYAAPVKGRFAISRDDSKNTLYLQMNSLKTEDTAVYYCTTDPGYSYGVDYWGQGTLVTVSS

SEQ ID NO: 609 - protein, 121 aa, synthetic construct
EVQLVQSGAEVKKPGESLKISCKGSGYSFTSYWIGWVRQMPGKGLEWMGIIYPGDSDTRYSPSFQGQVTISADKSISTAYLQWSSLKASDTAMYYCARPEYSSSSGYFQHWGQGTLVTVSS

SEQ ID NO: 610 - protein, 121 aa, synthetic construct
EVQLVESGGGLVQPGGSLRLSCAASGFTFSSYWMSWVRQAPGKGLEWVANIKQDGSEKYYVDSVKGRFTISRDNAKNSLYLQMNSLRAEDTAVYYCAREYNWNYEDAFDIWGQGTMVTVSS

SEQ ID NO: 611 - protein, 121 aa, synthetic construct
QITLKESGPTLVKPTQTLTLTCTFSGFSLSTSGVGVGWIRQPPGKALEWLALIYWNDDKRYSPSLKSRLTITKDTSKNQVVLTMTNMDPVDTATYYCAHRRGSYSNWFDPWGQGTLVTVSS

SEQ ID NO: 612 - protein, 121 aa, synthetic construct
QIQLVQSGAEVKKPGASVKVSCTASGYTFSSYGITWVRQAPGQGLEWMGWISAYNGNTHYAQNLQGRVTMTTDTSTTTAYMDLRSLRSDDTAIYYCARTLFGVVKNWFDPWGQGTLVTVSS

SEQ ID NO: 613 - protein, 114 aa, synthetic construct
QVQLVQSGASVKVSCKASGYTFTGYYMHWVRQAPGQGLEWMGWINPNSGGTNYAQKFQGRVTMTRDTSISTAYMELSRLRSDDTAVYYCAREVLGGGDCPFDYWGQGTLVTVSS

SEQ ID NO: 614 - protein, 121 aa, synthetic construct
QVQLVQSGAEVRKPVASVKVSCKASGYTFTDHSIHWVRQAPGQGLEWMGSINPNSGGTNYAQKFQGRVTMTWDTYNSTAFMELSRLRSDDTAVYYCARSDGGSHYVFFDDWGQGTLVTVSS

SEQ ID NO: 615 - protein, 121 aa, synthetic construct
EVQLVESGGGLVQPGRSLRLSCAASGFTFDDYAMHWVRQAPGKGLEWVSGISWNSGSIGYADSVKGRFTISRDNAKNSLYLQMNSLRAEDTALYYCAKDIAYSSSGHFDYWGQGTLVTVSS

SEQ ID NO: 616 - protein, 121 aa, synthetic construct
QVQLQESGPGLVKPSGTLSLTCVVSGGSITSSNWWSWVRQPPGKGLEWIGEIYHSGNTNYNPSLKSRVTISVDKSKNQFSLRLSSVTAADTAVYYCARAPLTGTTNWFDPWGQGTLVTVSS

SEQ ID NO: 617 - protein, 122 aa, synthetic construct
EVQLVESGGGLVKPGGSLRLSCAASGFTFSSYSMNWVRQAPGKGLEWVSSISSSSSYIYYADSVKGRFTISRDNAKNSLYLQMNSLRAEDTAVYYCAGVLYYDSSGYPFDYWGQGTLVTVSS

SEQ ID NO: 618 - protein, 122 aa, synthetic construct
QVQLVQSGSELKKPGASVKVSCKASGYTFTSYAMNWVRQAPGQGLEWMGWINTNTGNPTYAQGFTGRFVFSLDTSVSTAYLQISSLKAEDTAVYYCARDPLAARPVGWFDPWGQGTLVTVSS

SEQ ID NO: 619 - protein, 122 aa, synthetic construct
EVQLVESGGGLVKPGGSLRLSCAASGFTFSSYSMNWVRQAPGKGLEWVSSISSSSSYIYYADSVKGRFTISRDNAKNSLYLQMNSLRAEDTAVYYCAREDGYSSGWNYFDYWGQGTLVTVSS

SEQ ID NO: 620 - protein, 122 aa, synthetic construct
QVQLVQSGAEVKKPGASVKVSCKVSGYTLTELSMHWVRQAPGKGLEWMGGFDPEDGETIYAQKFQGRVTMTEDTSTDTAYMDLSSLRSEDTAVYYCATGGQTIVAARVFDYWGQGTLVTVSS

SEQ ID NO: 621 - protein, 122 aa, synthetic construct
QVQLVQSGSELKKPGASVKVSCKASGYTVTRHALNWVRQAPGQGLEWMGWINTNTGTPTYAQGFIGRFVFTLDTSVSTAYLQINSLKAEDTAVYYCARDQTPSDHYYYMDVWGKGTTVTVSS

SEQ ID NO: 622 - protein, 122 aa, synthetic construct
LAHLVQSGAEVKRPGASVKVSCKAFGYAFRGQHIHWVRQAPGQGLEWMGWIRPNSGDTNYSQKFQGRVTMTRDTSITTAYMELTRLRSDDSAVYYCARDRGITMRLDNMDVWGKGTMVTVSS

SEQ ID NO: 623 - protein, 122 aa, synthetic construct
EVQLVESGGTLVQPGGSLTLSCAASGFTFSDSAMHWVRQASGKGLEWVGRIRGKPNTYATAYAASVKGRFTISKDDSKNTAFLQMNSLKTEDRAVYYCTRRYNWNDVGFDYWGQGTLVTVSS

SEQ ID NO: 624 - protein, 123 aa, synthetic construct
QITLKESGPTLVKPTQTLTLTCTFSGFSLSTSGVGVGWIRQPPGKALEWLALIYWNDDKRYSPSLKSRLTITKDTSKNQVVLTMTNMDPVDTATYYCAHRPGITGNTGYFDYWGQGTLVTVSS

SEQ ID NO: 625 - protein, 123 aa, synthetic construct
QVQLVQSGAEVKKPGASVKVSCKASGYTFTSYGISWVRQAPGQGLEWMGWISAYNGNTNYAQKLQGRVTMTTDTSTSTAYMELRSLRSDDTAVYYCARCRYSGSLTSYYMDVWGKGTTVTVSS

SEQ ID NO: 626 - protein, 123 aa, synthetic construct
EVQLVESGGGLVQPGRSLRLSCAASGFTFDDYAMHWVRQAPGKGLEWVSGISWNSGSIGYADSVKGRFTISRDNAKNSLYLQMNSLRAEDTALYYCAKDMITGTTNYYYMDVWGKGTTVTVSS

SEQ ID NO: 627 - protein, 123 aa, synthetic construct
EVQLVESGGGLVQPGRSLRLSCAASGFTFDDYAMHWVRQAPGKGLEWVSGISRNSGSVGYADSVRGRFTISRDNAKNSLYLQMNSLRAEDTALYYCAKGGYDFWSGYYPFDPWGQGTLVTVSS

SEQ ID NO: 628 - protein, 123 aa, synthetic construct
EVQLVESGGGLVKPGGSLRLSCAASGFTFSNAWMSWVRQAPGKGLEWVGRIKSKTDGGTTDYAAPVKGRFTISRDDSKNTLYLQMNSLKTEDTAVYYCTTEGTTVTTWAFDIWGQGTMVTVSS

SEQ ID NO: 629 - protein, 122 aa, synthetic construct
QVQLQQSGPGLVKPSQTLSLTCAISGDSVSSNSAAWNWIRQSPSRGLEWLGRTYYRSKWYNDYAVSVKSRITINPDTSKNQFSLQLNSVTPEDTAVYYCASSGSYSDAFDIWGQGTMVTVSS

SEQ ID NO: 630 - protein, 123 aa, synthetic construct
QVQLVQSGSELKKPGASVMVSCKASGYTFTRNGINWLRQAPGQGLEWMGWIDTHTGNPTYVQGFTGRFVFSLDTSVNTAYLQISSLRAEDTAVYYCAKDRTGYYHYYYFMDVWGKGTAVTVSS

SEQ ID NO: 631 - protein, 123 aa, synthetic construct
QVQLVQSGTEMKKPGASVKVSCKASGYTFTTYGISWVRQAPGQGLEWMGWISAYNGNTNYAQKLQARVTMTTDTSTNTAYMELRSLRSDDTAVYYCARSGYNWKYDYYYMDVWGKGTTVTVSS

SEQ ID NO: 632 - protein, 124 aa, synthetic construct
EVQLVESGGGLVQPGGSLRLSCAASGFTFSSYWMSWVRQAPGKGLEWVANIKQDGSEKYYVDSVKGRFTISRDNAKNSLYLQMNSLRAEDTAVYYCAREGGYDFWSGLNWFDPWGQGTLVTVSS

SEQ ID NO: 633 - protein, 124 aa, synthetic construct
QVQLVQSGAEVKKPGASVKVSCKASGYTFTSYGISWVRQAPGQGLEWMGWISAYNGNTNYAQKLQGRVTMTTDTSTSTAYMELRSLRSDDTAVYYCARAGGIAAAGTGYWFDPWGQGTLVTVSS

SEQ ID NO: 634 - protein, 124 aa, synthetic construct; identical to SEQ ID NO: 165

SEQ ID NO: 635 - protein, 123 aa, synthetic construct
QVQLQQSGPGLVKPSQTLSLTCAISGDSVSSNSAAWNWIRQSPSRGLEWLGRTYYRSKWYNDYAVSVKSRITINPDTSKNQFSLQLNSVTPEDTAVYYCARDLELRGGAFDIWGQGTMVTVSS

SEQ ID NO: 636 - protein, 125 aa, synthetic construct
EVHLVESGGGLVRPGGSLRLSCEVSGFTFSTYSMNWVRQAPGKGLEWVSSISSRSSYIYYADSVKGRFTISRDNAKNSLYLQMNSLRAEDTAVYYCTRGEGATWGNYHCYYMDVWGKGTTVIVSS

SEQ ID NO: 637 - protein, 125 aa, synthetic construct
QVQLVQSGAEVKKPGASVKVSCKASGYSFTGYYMHWVRQAPGQGLEWMGWINPNSGGTNYAQKFQGRVTMTWDTSISTAYMELSRLRSDDTAVYYCARDQITMVRGFLGDWFDPWGQGTLVTVSS

SEQ ID NO: 638 - protein, 118 aa, synthetic construct
QLQLQESGPGLVKPSETLSLTCTVSGGSISSSSYYWGWIRQPPGKGLEWIGSIYYSGSTYYNPSLKSRVTISVDTSKNQFSLKLSSVTAADTAVYYCARGYSYEFDYWGQGTLVTVSS

SEQ ID NO: 639 - protein, 124 aa, synthetic construct
QVQLQQSGPGLVKPSQTLSLTCAISGDSVSSNSAAWNWIRQSPSRGLEWLGRTYYRSKWYNDYAVSVKSRITINPDTSKNQFSLQLNSVTPEDTAVYYCAREEIVGATTAFDIWGQGTMVTVSS

SEQ ID NO: 640 - protein, 124 aa, synthetic construct
QVQLQQSGPGLVKPSQTLSLTCAISGDSVSSNSAAWNWIRQSPSRGLEWLGRTYYRSKWYNDYAVSVKSRITINPDTSKNQFSLQLNSVTPEDTAVYYCARDYGGNSGWYFDLWGRGTLVTVSS

SEQ ID NO: 641 - protein, 118 aa, synthetic construct
QVQLQQWGAGLLKPSETLSLTCAVYGGSFSGHYWNWIRQPPGKGLEWIGEINHSGFTNYNPSLKSRVTISVDTPKNQFSLNLSSVTAADTAVYYCAREGLTGHVFDIWGQGTMVTVSS

SEQ ID NO: 642 - protein, 124 aa, synthetic construct
QVQVQQSGPGLVKPSQTLSLTCAISGDSVSSNSAAWNWIRQSPSRGLEWLGRTYYRSKWYNDFAVSVKSRITINPDTSKNQFSLQLNSVTPEDTAVYYCARGGGSGSYDWFDPWGQGTLVTVSS

SEQ ID NO: 643 - protein, 126 aa, synthetic construct
EVRLVESGGGLVKPGGSLRLSCAASGFIFSSYSMTWVRQAPGKGLEWVSSISGSSSFVKYGDSVKGRFTISRDNAKNSLYLQMNSLRAEDTAVYYCAREGVLCSGGSCYREIFDYWGQVTLVTVSS

SEQ ID NO: 644 - protein, 127 aa, synthetic construct
EVQLVESGEGLVKPGGSLRLSCVASGFDFTNAWMSWVRQAPGRGLEWVGRIKSKTDGGSIDYAAPVKGRFTISRDDSKTTLYLQMTSLRTEDTAVYYCSTSPYYDFWSGYYGYIDYWGQGTLVTVSS

SEQ ID NO: 645 - protein, 127 aa, synthetic construct
EVHLVESGGGLVKPGGSLRLSCVASRFTFSSAWMTWVRQVPGKGLEWIGRIKTKTEGGTTEYAAPVKGRFAISRDDSKKTLYLQMNSLKTEDTAVYYCSTSPYFDFWSGYYGYLDYWGQGTLVTVSS

SEQ ID NO: 646 - protein, 120 aa, synthetic construct
QLQLQESGPGLVKPSETLSLTCTVSGGSISSSSYYWGWIRQPPGKGLEWIGSIYYSGSTYYNPSLKSRVTISVDTSKNQFSLKLSSVTAADTAVYYCARHAAAGGWFDPWGQGTLVTVSS

SEQ ID NO: 647 - protein, 121 aa, synthetic construct
QLQLQESGPGLVKPSETLSLTCTVSGGSISSSSYYWGWIRQPPGKGLEWIGSIYYSGSTYYNPSLKSRVTISVDTSKNQFSLKLSSVTAADTAVYYCARRSSSGIGAFDIWGQGTMVTVSS

SEQ ID NO: 648 - protein, 121 aa, synthetic construct
QVQLQQWGAGLLKPSETLSLTCAVYGGSFSGYYWSWIRQPPGKGLEWIGEINHSGSTNYNPSLKSRVTISVDTSKNQFSLKLSSVTAADTAVYYCARGRGIAARPPYFDYWGQGTLVTVSS

SEQ ID NO: 649 - protein, 122 aa, synthetic construct
QLQLQESGPGLVKPSETLSLTCTVSGGSISSSSYYWGWIRQPPGKGLEWIGSIYYSGSTYYNPSLKSRVTISVDTSKNQFSLKLSSVTAADTAVYYCASEYSSSSLDAFDIWGQGTMVTVSS

SEQ ID NO: 650 - protein, 123 aa, synthetic construct
QVQLQQWGAGLLKPSETLSLTCAVYGGSFSGYYWSWIRQPPGKGLEWIGEINHSGSTNYNPSLKSRVTISVDTSKNQFSLKLSSVTAADTAVYYCARGTTVVTPTEYYYMDVWGKGTTVTVSS

SEQ ID NO: 651 - protein, 131 aa, synthetic construct
QVQLVQSGAEVKKPGASVKVSCKASGYTFTSYDINWVRQATGQGLEWMGWLNPKNGYTGYSHKFQGRVTMTRNTSISTAYMELSSLRSEDAAVYFCARRGDFWSGYYSTSQNIVIHWFDSWGLGTLVTVSS

SEQ ID NO: 652 - protein, 110 aa, synthetic construct; identical to SEQ ID NO: 442

SEQ ID NO: 653 - protein, 108 aa, synthetic construct
SYELTQPPSVSVSPGQTARITCSGDALPKKYAYWYQQKSGQAPVLVIYEDSKRPSGIPERFSGSSSGTMATLTISGAQVEDEADYYCYSTDSSGNHSVFGTGTKVTVL

SEQ ID NO: 654 - protein, 111 aa, synthetic construct; identical to SEQ ID NO: 491

SEQ ID NO: 655 - protein, 106 aa, synthetic construct; identical to SEQ ID NO: 381

SEQ ID NO: 656 - protein, 107 aa, synthetic construct; identical to SEQ ID NO: 450

SEQ ID NO: 657 - protein, 111 aa, synthetic construct
QSVLTQPPSVSGAPGQRVTISCTGSSSNIGAGYDVHWYQQLPGTAPKLLIYGNSNRPSGVPDRFSGSKSGTSASLAITGLQAEDEADYYCQSYDSSLSGSVFGGGTKLTVL

SEQ ID NO: 658 - protein, 110 aa, synthetic construct; identical to SEQ ID NO: 480

SEQ ID NO: 659 - protein, 110 aa, synthetic construct; identical to SEQ ID NO: 404

SEQ ID NO: 660 - protein, 108 aa, synthetic construct; identical to SEQ ID NO: 454

SEQ ID NO: 661 - protein, 108 aa, synthetic construct; identical to SEQ ID NO: 345

SEQ ID NO: 662 - protein, 110 aa, synthetic construct
QSVLTQPPSASGTPGQRVTISCSGSSSNIGSNTVNWYQQLPGTAPKLLIYSNNQRPSGVPDRFSGSKSGTSASLAISGLQSEDEADYYCAAWDDSLNGPVFGGGTKLTVL

SEQ ID NO: 663 - protein, 110 aa, synthetic construct
QSALTQPPSASGSPGQSVTISCTGTSSDVGGYNYVSWYQQHPGKAPKLMIYEVSKRPSGVPDRFSGSKSGNTASLTVSGLQAEDEADYYCSSYAGSNNYVFGTGTKVTVL

SEQ ID NO: 664 - protein, 110 aa, synthetic construct; identical to SEQ ID NO: 378

SEQ ID NO: 665 - protein, 106 aa, synthetic construct
SYELTQPLSVSVALGQTARITCGGNNIGSKNVHWYQQKPGQAPVLVIYRDSNRPSGIPERFSGSNSGNTATLTISRAQAGDEADYYCQVWDSSTVVFGGGTKLTVL

SEQ ID NO: 666 - protein, 108 aa, synthetic construct; identical to SEQ ID NO: 364

SEQ ID NO: 667 - protein, 110 aa, synthetic construct; identical to SEQ ID NO: 366

SEQ ID NO: 668 - protein, 106 aa, synthetic construct
SYELTQPPSVSVSPGQTASITCSGDKLGDKYACWYQQKPGQSPVLVIYQDSKRPSGIPERFSGSNSGNTATLTISGTQAMDEADYYCQAWDSSTGVFGGGTKLTVL

SEQ ID NO: 669 - protein, 107 aa, synthetic construct; identical to SEQ ID NO: 429

SEQ ID NO: 670 - protein, 108 aa, synthetic construct; identical to SEQ ID NO: 369

SEQ ID NO: 671 - protein, 108 aa, synthetic construct
SYELTQPPSVSVSPGQTARITCSGDALPKKYAYWYQQKSGQAPVLVIYEDSKRPSGIPERFSGSSSGTMATLTISGAQVEDEADYYCYSIDSSGNHRVFGGGTKLTVL

SEQ ID NO: 672 - protein, 108 aa, synthetic construct; identical to SEQ ID NO: 369

SEQ ID NO: 673 - protein, 108 aa, synthetic construct; identical to SEQ ID NO: 369

SEQ ID NO: 674 - protein, 110 aa, synthetic construct
QSALTQPASVSGSPGQSITISCTGTSSDVGGYNYVSWYQQHPGKAPKLMIYEVSDRPSGVSNRFSGSKSGNTASLTISGLQAEDEADYYCSSYTRSSTCVFGGGTKLTVL

SEQ ID NO: 675 - protein, 110 aa, synthetic construct; identical to SEQ ID NO: 335

SEQ ID NO: 676 - protein, 111 aa, synthetic construct; identical to SEQ ID NO: 356

SEQ ID NO: 677 - protein, 106 aa, synthetic construct; identical to SEQ ID NO: 338

SEQ ID NO: 678 - protein, 107 aa, synthetic construct
SYELTQPPSVSVSPGQTARITCSADALPKQYAYWYQQKPGQAPVLVIYKDSERPSGIPERFSGSSSGTTVTLTISGVQAEDEADYYCQSADSSGTWVFGGGTKLTVL

SEQ ID NO: 679 - protein, 108 aa, synthetic construct; identical to SEQ ID NO: 369

SEQ ID NO: 680 - protein, 108 aa, synthetic construct; identical to SEQ ID NO: 369

SEQ ID NO: 681 - protein, 108 aa, synthetic construct; identical to SEQ ID NO: 369

SEQ ID NO: 682 - protein, 108 aa, synthetic construct; identical to SEQ ID NO: 369

SEQ ID NO: 683 - protein, 108 aa, synthetic construct; identical to SEQ ID NO: 369

SEQ ID NO: 684 - protein, 106 aa, synthetic construct
SYELTQPLSVSVALGQTARITCGGNNIGSKNVHWYQQKPGQAPVLVIYRDSNRPSGIPERFSGSNSGNTATLTISRAQAGDEADYYCQVWDSSTGVFGGGTKLTVL

SEQ ID NO: 685 - protein, 108 aa, synthetic construct; identical to SEQ ID NO: 386

SEQ ID NO: 686 - protein, 109 aa, synthetic construct
QTVVTQEPSLTVSPGGTVTLTCASSTGAVTSGYYPNWFQQKPGQAPRALIYSTSNKHSWTPARFSGSLLGGKAALTLSGVQPEDEAEYYCLLYYGGAVVFGGGTKLTVL

SEQ ID NO: 687 - protein, 110 aa, synthetic construct; identical to SEQ ID NO: 367

SEQ ID NO: 688 - protein, 106 aa, synthetic construct; identical to SEQ ID NO: 371

SEQ ID NO: 689 - protein, 106 aa, synthetic construct; identical to SEQ ID NO: 371

SEQ ID NO: 690 - protein, 106 aa, synthetic construct; identical to SEQ ID NO: 371

SEQ ID NO: 691 - protein, 108 aa, synthetic construct; identical to SEQ ID NO: 369

SEQ ID NO: 692 - protein, 108 aa, synthetic construct; identical to SEQ ID NO: 369

SEQ ID NO: 693 - protein, 108 aa, synthetic construct; identical to SEQ ID NO: 369

SEQ ID NO: 694 - protein, 108 aa, synthetic construct; identical to SEQ ID NO: 369

SEQ ID NO: 695 - protein, 108 aa, synthetic construct; identical to SEQ ID NO: 369

SEQ ID NO: 696 - protein, 108 aa, synthetic construct; identical to SEQ ID NO: 369

SEQ ID NO: 697 - protein, 108 aa, synthetic construct; identical to SEQ ID NO: 369

SEQ ID NO: 698 - protein, 108 aa, synthetic construct; identical to SEQ ID NO: 374

SEQ ID NO: 699 - protein, 108 aa, synthetic construct; identical to SEQ ID NO: 374

SEQ ID NO: 700 - protein, 108 aa, synthetic construct; identical to SEQ ID NO: 369

SEQ ID NO: 701 - protein, 110 aa, synthetic construct
QSALTQPASVSGSLGQSITISCTGTSSDVGGYNYVSWYQHHPGKAPKIMIYDVSNRPSGVSNRFSASKSGNTASLTISGLQTEDEADYYCSSYTTSSTWVFGGGTNLTVL

SEQ ID NO: 702 - protein, 110 aa, synthetic construct
QSALTQPASVSGSPGQSITISCTGTSSDVGGYNYVSWYQQHPGKAPKLMIYEVSNRPSVISYRFSGSKSGNTASLTISGLQAEDEADYYCNSYTTNTTRVFGGGTKLTVL

SEQ ID NO: 703 - protein, 110 aa, synthetic construct
QSALTQPASVSGSPGQSITISCTGTSSDVGGYNYVSWYQQHPGKAPKLMIYEVSNRPSGVSNRFSGSKSGNTASLTISGLQAEDEADYYCSSYTSSSTRVFGGGTKLTVL

SEQ ID NO: 704 - protein, 115 aa, synthetic construct
QAVLTQPASLSASPGASASLTCTLRSGIYVGTYRIYWYQQKPGSPPQYLLRYKSDSDKQQGSGVPSRFSGSKDVSANAGILLISGLQSEDEADYYCMTWHSSAVVFGGGTKLTVL

SEQ ID NO: 705 - protein, 105 aa, synthetic construct
SYELTQPPSVSVSPGQTASITCSGDKLGDKYACWYQQKPGQSPVLVIYQDSKRPSGIPERFSGSNSGNTATLTISGTQAMDEADYYCQAWDSSTVFGGGTKLTVL

SEQ ID NO: 706 - protein, 106 aa, synthetic construct; identical to SEQ ID NO: 371

SEQ ID NO: 707 - protein, 106 aa, synthetic construct
SYELTQPSSVSVSPGQTARITCSGDVLAKKYARWFQQKPGQAPVLVIYKDSERPSGIPERFSGSSSGTTVTLTISGAQVEDEADYYCYSAADNNWVFGGGTKLTVL

SEQ ID NO: 708 - protein, 106 aa, synthetic construct; identical to SEQ ID NO: 338

SEQ ID NO: 709 - protein, 108 aa, synthetic construct; identical to SEQ ID NO: 369

SEQ ID NO: 710 - protein, 108 aa, synthetic construct; identical to SEQ ID NO: 369

SEQ ID NO: 711 - protein, 108 aa, synthetic construct; identical to SEQ ID NO: 386

SEQ ID NO: 712 - protein, 108 aa, synthetic construct; identical to SEQ ID NO: 369

SEQ ID NO: 713 - protein, 108 aa, synthetic construct; identical to SEQ ID NO: 369

SEQ ID NO: 714 - protein, 109 aa, synthetic construct
QTVVTQEPSLTVSPGGTVTLTCASSTGAVTSGYYPNWFQQKPGQAPRALIYSTSNKHSWTPARFSGSLLGGKAALTLSGVQPEDEAEYYCLLYYGGAWVFGGGTKLTVL

SEQ ID NO: 715 - protein, 110 aa, synthetic construct; identical to SEQ ID NO: 341

SEQ ID NO: 716 - protein, 111 aa, synthetic construct
QSALTQPPSVSGAPGQRVTISCTGSSSNIGAGYDVHWFQQLPGTAPKLLIYDNNNRPSGVPNRFSGSKSGTSASLAITGLQADFEADYYCQSYDGSLNGWVFGGGTKLTVL

SEQ ID NO: 717 - protein, 108 aa, synthetic construct
SSELTQDPAVSVALGQTVRITCQGDSLRNYYASWYQQKPGQAPVLVIYGKNNRPSGIPDRFSGSSSGNIASLTITGAQAEDEADYYCKSRDRSGNHWVFGGGTKVTVL

SEQ ID NO: 718 - protein, 108 aa, synthetic construct; identical to SEQ ID NO: 344

SEQ ID NO: 719 - protein, 108 aa, synthetic construct; identical to SEQ ID NO: 374

SEQ ID NO: 720 - protein, 108 aa, synthetic construct; identical to SEQ ID NO: 369

SEQ ID NO: 721 - protein, 108 aa, synthetic construct
SSELTQDPAVSVALGQTVRITCQGDNLRNYSVSWCQQRPGQAPTLVIFGKNNRPSGIPDRFSGSNSGNTASLTITGAQAEDEADYYCNSRDISGKHWVFGGGTKLTVL

SEQ ID NO: 722 - protein, 108 aa, synthetic construct; identical to SEQ ID NO: 364

SEQ ID NO: 723 - protein, 108 aa, synthetic construct; identical to SEQ ID NO: 369

SEQ ID NO: 724 - protein, 108 aa, synthetic construct; identical to SEQ ID NO: 369

SEQ ID NO: 725 - protein, 108 aa, synthetic construct; identical to SEQ ID NO: 374

SEQ ID NO: 726 - protein, 108 aa, synthetic construct; identical to SEQ ID NO: 387

SEQ ID NO: 727 - protein, 108 aa, synthetic construct
SSELTQDPAVSVALGQTVRITCQGDSLRSYYANWYQQKPGQAPILVIYGKNNRPSGIPDRFSGSSSGNTASLTITGAQAEDESDYYCNSRDSSGNHWVFGGGTKLTVL

SEQ ID NO: 728 - protein, 108 aa, synthetic construct
SSELTQDPAVSVALGQTVRITCQGDSLRTYYASWYQQKPGQAPILVIYGKNNRPSGIPDRFSGSSSGNTASLTITGAQAEDEADYSCNSRDSSGSHVVFGGGTKLTVL

SEQ ID NO: 729 - protein, 109 aa, synthetic construct
SYELTQPPSVSVSPGQTARITCSGDALPKKYAYWYQQKSGQAPVLVIYEDSKRPSGIPERFSGSSSGTMATLTISGAQVEDEADYYCYSTDSSGNHSVVFGGGTKLTVL

SEQ ID NO: 730 - protein, 109 aa, synthetic construct; identical to SEQ ID NO: 714

SEQ ID NO: 731 - protein, 110 aa, synthetic construct
QSALTQPASVSGSPGQSITISCTGTSSDVGGYNYVSWYQQHPGKAPKVIIYEVIIRPSGVSPRFSGSKSGKMASLTISGLQAEDEADYYCSSYTSSSTWVFGGGTKLTVL

SEQ ID NO: 732 - protein, 111 aa, synthetic construct
QSALTQPASVSGSPGQSITISCTGTSSDVGGYNYVSWYQQHPGKAPKLMIYEVSNRPSGVSNRFSGSKSGNTASLTISGLQAEDEADYYCSSYTSSSTLYVFGTGTKVTVL

SEQ ID NO: 733 - protein, 111 aa, synthetic construct
QSALTQPASVSGSPGQSITISCTGTSSDVGGYNYVSWYQQHPGKAPKLMIYEVSNRPSGVSNRFSGSKSGNTASLTISGLQAEDEADYYCSSYTSSSTPYVFGTGTKVTVL

SEQ ID NO: 734 - protein, 106 aa, synthetic construct; identical to SEQ ID NO: 371

SEQ ID NO: 735 - protein, 108 aa, synthetic construct; identical to SEQ ID NO: 369

SEQ ID NO: 736 - protein, 108 aa, synthetic construct
SYVLTQSPSMSVAPGKTARITCGGNNIGSKSVHWYQQRPGQAPVLVIYYDSDRPSGIPERFSGSNSGNTATLTISRVEAGDEAVYYCQVWDSSSYHYVFGTGTKVAVL

SEQ ID NO: 737 - protein, 108 aa, synthetic construct; identical to SEQ ID NO: 369

SEQ ID NO: 738 - protein, 108 aa, synthetic construct; identical to SEQ ID NO: 369

SEQ ID NO: 739 - protein, 109 aa, synthetic construct
QTVVTQEPSLTVSPGGTVTLTCASSTGAVTSGYYPNWFQQKPGQAPRALIYSTSNKHSWTPARFSGSLLGGKAALTLSGVQPEDEAEYYCLLYYGGAQVFGGGTKLTVL

SEQ ID NO: 740 - protein, 110 aa, synthetic construct; identical to SEQ ID NO: 391

SEQ ID NO: 741 - protein, 110 aa, synthetic construct
QSVLSQPPSVSEAPRQRVTISCSGSSSNIGNNAVNWYQKLPGKAPKLLISHDVLLSSGVSDRFSGSKSGTSASLAISGLQSEDEADYYCAAWDGRLNEWVFGGGTKLTVL

SEQ ID NO: 742 - protein, 110 aa, synthetic construct
QSVLTQPPSASGTPGQRVTISCSGSSSNIGSNTVNWYQQLPGTAPKLLIYSNNQRPSGVPDRFSGSKSGTSASLAISGLQSEDEADYYCAAWDDSLNGVVFGGGTKLTVL

SEQ ID NO: 743 - protein, 110 aa, synthetic construct
QSVLTQPPSVSEAPRQRVTISCSGSISNIGNNAVSWYQQVPGKAPKLLIYYDDLLPSGVSDRFSGSRSVTSASLAISGLQSEDDADYYCTAWDDRLNGPVFGGGTKLTVL

SEQ ID NO: 744 - protein, 110 aa, synthetic construct; identical to SEQ ID NO: 341

SEQ ID NO: 745 - protein, 111 aa, synthetic construct
QSVLTQPPSVSGAPGQRVTISCSGSSSNIGAGYDVHWYQQLPGTGPKVLIYGNRNRPSGVPDRFSGSKSGTSASLVITGLQAEDEADYSCQSYDSSLSGWVFGGGTKLTVL

SEQ ID NO: 746 - protein, 106 aa, synthetic construct; identical to SEQ ID NO: 338

SEQ ID NO: 747 - protein, 106 aa, synthetic construct; identical to SEQ ID NO: 494

SEQ ID NO: 748 - protein, 108 aa, synthetic construct; identical to SEQ ID NO: 374

SEQ ID NO: 749 - protein, 108 aa, synthetic construct; identical to SEQ ID NO: 387

SEQ ID NO: 750 - protein, 108 aa, synthetic construct
SSELTQDPAVSVALGQTVRITCQGDSLRSYYASWYQQKPGQAPVLVIYGKNNRPSGIPDRFSGSSSGNTASLTITGAQAEDEADYYCNSRDSSGNHYVFGTGTKVTVL

SEQ ID NO: 751 - protein, 108 aa, synthetic construct; identical to SEQ ID NO: 386

SEQ ID NO: 752 - protein, 110 aa, synthetic construct
QSALTQPASVSGSPGQSITISCTGTSSDVGAYNYVSWYQQHPGKAPKFMIYDVSKRPSGVSNRFSGSKSGNTASLTISGLQAEDEADYYCCSYAGSNTYVFGTGTRVTVL

SEQ ID NO: 753 - protein, 106 aa, synthetic construct; identical to SEQ ID NO: 371

SEQ ID NO: 754 - protein, 106 aa, synthetic construct; identical to SEQ ID NO: 371

SEQ ID NO: 755 - protein, 106 aa, synthetic construct; identical to SEQ ID NO: 371

SEQ ID NO: 756 - protein, 107 aa, synthetic construct
SYELTQPLSVSVALGQTARITCGENNIVNKNVHWYQQKPGQAPVLVIYRDGNRPSGIPERFSGSNSGNTATLTISRAQAGDEADYYCQVWDNNTPWVFGGGTKLTVL

SEQ ID NO: 757 - protein, 108 aa, synthetic construct; identical to SEQ ID NO: 369

SEQ ID NO: 758 - protein, 108 aa, synthetic construct; identical to SEQ ID NO: 369

SEQ ID NO: 759 - protein, 110 aa, synthetic construct
QSVLTQPPSASGAPGQRVTMSCSGSSSNIERTAVNWYSHLPGAAPKLLIYSNDQRPLGVPDRFAGSKSGSSASLAISGLQSEDEAAYFCAAWDDSLNGWLFGGGTKLTVL

SEQ ID NO: 760 - protein, 112 aa, synthetic construct
QSVLTQPPSVSGAPGQRVTISCTGNSSNIGADYDVQWYQQFPGTAPKLLIYANIIRPSGVPDRFSGSKSGTSASLAITGLQAEDEADYYCQSYDSSLSGSLVFGGGTKLTVL

SEQ ID NO: 761 - protein, 108 aa, synthetic construct; identical to SEQ ID NO: 369

SEQ ID NO: 762 - protein, 108 aa, synthetic construct; identical to SEQ ID NO: 369

SEQ ID NO: 763 - protein, 108 aa, synthetic construct; identical to SEQ ID NO: 353

SEQ ID NO: 764 - protein, 108 aa, synthetic construct; identical to SEQ ID NO: 369

SEQ ID NO: 765 - protein, 108 aa, synthetic construct; identical to SEQ ID NO: 369

SEQ ID NO: 766 - protein, 108 aa, synthetic construct; identical to SEQ ID NO: 386

SEQ ID NO: 767 - protein, 108 aa, synthetic construct; identical to SEQ ID NO: 369

SEQ ID NO: 768 - protein, 108 aa, synthetic construct; identical to SEQ ID NO: 456

SEQ ID NO: 769 - protein, 108 aa, synthetic construct; identical to SEQ ID NO: 369

SEQ ID NO: 770 - protein, 110 aa, synthetic construct
QSALTQPASVSGSPGQSITISCTGTSSDVGVYNYVSWYQQHPTKAPKLMIYEVSNRPSGVSNRFSGSKSGNTASLTISGLQAEDEADYYCSSYTSSITWVFGGGTKLTVL

SEQ ID NO: 771 - protein, 110 aa, synthetic construct; identical to SEQ ID NO: 335

SEQ ID NO: 772 - protein, 108 aa, synthetic construct; identical to SEQ ID NO: 386

SEQ ID NO: 773 - protein, 111 aa, synthetic construct
QSVLTQPPSVSGAPGQRVTISCTGSSSNIGAGYAVHWYQQFPGIAPKLLIYGNINRPSGVPDRFSGSKSDTSASLAITGLQAEDEADYYCQSFDSSLSGVMFGGGTKLTVL

SEQ ID NO: 774 - protein, 113 aa, synthetic construct
WAQSVLTQPPSVSGAPGQRVTISCSGSSSNIGAGYAVHWYQLLPGTVPKLLIYGNLNRPSGVPDRFSGSMSDTSVSLAITGLQAEDEADYYCQSYDSSLSGVVFGGGTKVTVL

SEQ ID NO: 775 - protein, 115 aa, synthetic construct; identical to SEQ ID NO: 346

SEQ ID NO: 776 - protein, 106 aa, synthetic construct; identical to SEQ ID NO: 371

SEQ ID NO: 777 - protein, 108 aa, synthetic construct; identical to SEQ ID NO: 387

SEQ ID NO: 778 - protein, 108 aa, synthetic construct; identical to SEQ ID NO: 369

SEQ ID NO: 779 - protein, 106 aa, synthetic construct; identical to SEQ ID NO: 371

SEQ ID NO: 780 - protein, 111 aa, synthetic construct; identical to SEQ ID NO: 657

SEQ ID NO: 781 - protein, 116 aa, synthetic construct
QVQLVQSGAEVKKPGASVKVSCKASGYTFTSYDINWVRQATGQGLEWMGWMNPNSGNTGYAQKFQGRVTMTRNTSISTAYMELSSLRSEDTAVYYCARWGRGFDPWGQGTLVTVSS

SEQ ID NO: 782 - protein, 119 aa, synthetic construct
QVQLVQSGAEVKKPGSSVKVSCKASGGTFSSYAISWVRQAPGQGLEWMGGIIPIFGTANYAQKFQGRVTITADESTSTAYMELSSLRSEDTAVYYCARERLELRWFDPWGQGTLVTVSS

SEQ ID NO: 783 - protein, 118 aa, synthetic construct
QLQLQESGPGLVKPSETLSLTCTVSGGSISSSSYYWGWIRQPPGKGLEWIGSIYYSGSTYYNPSLKSRVTISVDTSKNQFSLKLSSVTAADTAVYYCARQTDYWFDPWGQGTLVTVSS

SEQ ID NO: 784 - protein, 120 aa, synthetic construct
EVQLVESGGGLVRPGGSLRLSCAASGFTFSSYSIHWVRQAPGKGLEWVSSISSSSTYIYYADSLKGRFTISRDNAKNSLYLQMNSLRAEDTAVYYCAREGGIAVAGFDYWGQGTLVTVSS

SEQ ID NO: 785 - protein, 120 aa, synthetic construct
EVQLVESGGGLVQPGGSLRLSCAASGFTFSSYDMHWVRQATGKGLEWVSAIGTAGDTYYPGSVKGRFTISRENAKNSLYLQMNSLRAGDTAVYYCARDSSSWYEDAFDIWGQGTMVTVSS

SEQ ID NO: 786 - protein, 120 aa, synthetic construct
EVQLVESGGGLVKPGGSLRLSCAASGFTFSDYYMSWIRQAPGKGLEWVSYISSSGSTIYYADSVKGRFTISRDNAKNSLYLQMNSLRAEDTAVYYCAREETMVRGVIAYWGQGTLVTVSS

SEQ ID NO: 787 - protein, 116 aa, synthetic construct
EVQLVESGGGLVKPGGSLRLSCAVSGFTFSTDSMNWVRQAPGKGLEWVSSISGSSSYIYYTDSVKGRFTISRDNAKNSLFLQMNSLRAEDTAVYYCARDWGSFDLWGRGTLVTVSS

SEQ ID NO: 788 - protein, 121 aa, synthetic construct
EVQLVESGGGLIQPGGSLRLSCAASGFTVSSNYMSWVRQAPGKGLEWVSVIYSGGSTYYADSVKGRFTISRDNSKNTLYLQMNSLRAEDTAVYYCARDGGEYSSSYYFDYWGQGTLVTVSS

SEQ ID NO: 789 - protein, 117 aa, synthetic construct
QLQLQESGPGLVKPSETLSLTCTVSGGSISSSSYYWGWIRQPPGKGLEWIGSIYYSGSTYYNPSLKSRVTISVDTSKNQFSLKLSSVTAADTAVYYCARHDPSFDYWGQGTLVTVSS

SEQ ID NO: 790 - protein, 118 aa, synthetic construct
QVQLVQSGAEVKKPGASVKVSCKASGYTFTSYGISWVRQAPGQGLEWMGWISAYNGNTNYAQKLQGRVTMTTDTSTSTAYMELRSLRSDDTAVYYCARERSNWDFDYWGQGTLVTVSS

SEQ ID NO: 791 - protein, 122 aa, synthetic construct
EVQLVESGGGLVQPGGSLRLSCAASGFTFSSYWMSWVRQAPGKGLEWVANIKQDGSEKYYVDSVKGRFTISRDNAKNSLYLQMNSLRAEDTAVYYCARDGGVRGVITYFDYWGQGTLVTVSS

SEQ ID NO: 792 - protein, 121 aa, synthetic construct
QVQLVQSGAEVKKPGASVKVSCKASGYTFTSYDINWVRQATGQGLEWMGWMNPNSGNTGYAQKFQGRVTMTRNTSISTAYMELSSLRSEDTAVYYCARGRGSSWYWYFDLWGRGTLVTVSS

SEQ ID NO: 793 - protein, 117 aa, synthetic construct
EVQLVESGGGLVQPGGSLRLSCAASGFTFSSYDMHWVRQATGKGLEWVSAIGTAGDTYYPGSVKGRFTISRENAKNSLYLQMNSLRAGDTAVYYCARGSSSSAFDIWGQGTMVTVSS

SEQ ID NO: 794 - protein, 120 aa, synthetic construct
EVQLVESGGGLVKPGGSLRLSCAASGFTFSSYSMNWVRQAPGKGLEWVSSISSSSSYIYYADSVKGRFTISRDNAKNSLYLQMNSLRAEDTAVYYCARDGGIAAAGTDYWGQGTLVTVSS

SEQ ID NO: 795 - protein, 120 aa, synthetic construct
EVQLVESGGGLVKPGGSLRLSCAASGFTFSSYSMNWVRQAPGKGLEWVSSISSSSSYIYYADSVKGRFTISRDNAKNSLYLQMNSLRAEDTAVYYCARADSLTGGFFDYWGQGTLVTVSS

SEQ ID NO: 796 - protein, 116 aa, synthetic construct
QVQLVQSESELKKPGASVKVSCKASGYTFISYAMSWVRQAPGQGLEWMGWINTNTGNPTYAQGFTGRFVFSLDTSVSTAYLQISSLKAEDTAVYYCAERGWNYDYWGQGTLVTVSS

SEQ ID NO: 797 - protein, 118 aa, synthetic construct
EVQLVESGGGLIQPGGSLRLSCAASGFTVSSNYMSWVRQAPGKGLEWVSVIYSGGSTYYADSVKGRFTISRDNSKNTLYLQMNSLRAEDTAVYYCARDSTTVTLFDYWGQGTLVTVSS

SEQ ID NO: 798 - protein, 121 aa, synthetic construct
EVQLVESGGGLVKPGGSLRLSCAASGFTFSSYSMNWVRQAPGKGLEWVSSISSSSSYIYYADSVKGRFTISRDNAKNSLYLQMNSLRAEDTAVYYCARGIAVAGPHAFDIWGQGTMVTVSS

SEQ ID NO: 799 - protein, 116 aa, synthetic construct
EVQLVESGGGLIQPGGSLRLSCAASGFTVSSNYMSWVRQAPGKGLEWVSVIYSGGSTYYADSVKGRFTISRDNSKNTLYLQMNSLRAEDTAVYYCARGYSGSYAYWGQGTLVTVSS

SEQ ID NO: 800 - protein, 122 aa, synthetic construct
QVQLQQSGPGLVKPSQTLSLTCAISGDSVSSNSAAWNWIRQSPSRGLEWLGRTYYRSKWYNDYAGSVKSRIIINPDTSKNQLSLQLKSVTPEDTAVYYCARKWELRDAFDIWGQGTMVTVSS

SEQ ID NO: 801 - protein, 121 aa, synthetic construct
EVQLVQSGAVVKKPGESLKISCKGSGYSFSSYWIGWVRQMPGKGLEWMGIIYPGDSDTRYSPSFQGQVTISADKSISTAYLQWSSLQASDTAMYFCAKRRMTGSHSWFDPWGQGTLVTVSS

SEQ ID NO: 802 - protein, 112 aa, synthetic construct
EVQLVESGGGLVQPGGSLRLSCAASGFTFSSYWMHWVRQAPGKGLVWVSRINSDGSSTSYADSVKGRFTISRDNAKNTLYLQMNSLRAEDTAVYYCARIDYWGQGTLVTVSS

SEQ ID NO: 803 - protein, 113 aa, synthetic construct
EVQLVESGGGLVQPGGSLRLSCAASGFTFSSYWMSWVRQAPGKGLEWVANIKQDGSEKYYVDSVKGRFTISRDNAKNSLYLQMNSLRAEDTAVYYCARDGGTPGQGTLVTVSS

SEQ ID NO: 804 - protein, 115 aa, synthetic construct
QVQLQESGPGLVKPSETLSLTCTVSGGSISSYYWSWIRQPPGKGLEWIGYIYYSGSTNYNPSLKSRVTISVDTSKNQFSLKLSSVTAADTAVYYCAIVGARFDYWGQGTLVTVSS

SEQ ID NO: 805 - protein, 115 aa, synthetic construct
EVQLVESGGGLVKPGGSLRLSCAASGFTFINAWMSWVRQAPGKGLEWVGRIKSKTDGGTTDYAAPVKGRFTISRDDSKNTLYLQMNSLKTEDTAVYYCTTGGTHWGQGTLVTVSS

SEQ ID NO: 806 - protein, 115 aa, synthetic construct
EVQLVESGGGLVKPGGSLRLSCAASGFTFSNAWMSWVRQAPGKGLEWVGRIKSKTDGGTTDYAAPVKGRFTISRDDSKNTLYLQMNSLKTEDTAVYYCTTGGYRWGQGTLVTVSS

SEQ ID NO: 807 - protein, 115 aa, synthetic construct
EVQLVESGGGLVKPGGSLRLSCAASGFTFSNAWMSWVRQAPGKGLEWVGRIKSKTDGGTTDYAAPVKGRFTISRDDSKNTLYLQMNSLKTEDTAVYYCTTDLYYWGQGTLVTVSS

SEQ ID NO: 808 - protein, 115 aa, synthetic construct
QVQLVQSGAEVKKPGASVKVSCKASGYTFTSYGISWVRQAPGQGLEWMGWISAYNGNTNYAQKLQGRVTMTTDTSTSTAYMELRSLRSDDTAVYYCARGWYFDYWGQGTLVTVSS

SEQ ID NO: 809 - protein, 115 aa, synthetic construct
EVQLVESGGGLVQPGGSLRLSCAASGFTFSTYAMNWVRQAPGKGLEWVSAISGGGGSTYYADSVKGRFTISRDNSKNTLYLQMNSLRAEDTAVYYCAKRVFFDYWGQGTLVTVSS

SEQ ID NO: 810 - protein, 116 aa, synthetic construct
EVQLVESGGGLVQPGGSLRLSCAASGFTFSSYDMHWVRQATGKGLEWVSAIGTAGDTYYPGSVKGRFTISRENAKNSLYLQMNSLRAGDTAVYYCARDLGRVFDYWGQGTLVTVSS

SEQ ID NO: 811 - protein, 116 aa, synthetic construct
VVQLVESGGGLVQPGGSLRLSCAASGFTFSRYWMSWVRQAPGKGLEWVANINQDGSEEYYVDSVKGRFTISRDNAKSSLSLQMNSLRAEDTALYYCATDLNWNGYWGQGTLVTVSS

SEQ ID NO: 812 - protein, 116 aa, synthetic construct
EVQLVESGGGLVQPGGSLRLSCAASGFTFSRCDMYWVRQATGKGLEWVSAIGAAGDTYYPGSVKGRFTISRENAKNSLYLQMNSLRAGDTAVYYCATGYNWNPDYWGQGTLVTVSS

SEQ ID NO: 813 - protein, 117 aa, synthetic construct
QVQLVESGGGVVQPGRSLRLSCEASGFTFINYGMHWVRQAPGKGLEWVAVIWYDGSNKYYADSVKGRFTISRDNSKNTLYLQMNSLRAEDTAVYYCARDRSSSSDYWGQGTLVIVSS

SEQ ID NO: 814 - protein, 117 aa, synthetic construct
EVQLVESGGGLVQPGGSLRLSCAASGFTFSSYWMHWVRQAPGKGLVWVSRINSDGSSTSYADSVKGRFTISRDNAKNTLYLQMNSLRAEDTAVYYCAGITGTYFDYWGQGTLVTVSS

SEQ ID NO: 815 - protein, 117 aa, synthetic construct
EVQLVESGGGLVQPGRSLRLSCAASGFTFDDYAMHWVRQAPGKGLEWVSGISWNSGSIGYADSVKGRFTISRDNAKNSLYLQMNSLRAEDTALYYCAKDSGYSPDYWGQGTLVTVSS

SEQ ID NO: 816 - protein, 117 aa, synthetic construct
QVQLVQSGAEVKKPGASVKVSCKASGYTFTSYGISWVRQAPGQGLEWMGWISAYNGNTNYAQKLQGRVTMTTDTSTSTAYMELRSLRSDDTAVYYCARDRPYYFDYWGQGTLVTVSS

SEQ ID NO: 817 - protein, 117 aa, synthetic construct
QVQVVQSGAEVRKSGASVKVSCKASGYTFTSYYIHWVRQVPGQGLEWMGLINPSGGSTIYAQKFQGRVTMTRDTSTSSVYMELSSLRSEDTAAYYCARGGWGTMDVWGKGTTVTVSS

SEQ ID NO: 818 - protein, 117 aa, synthetic construct
EVQLVESGGGLVQPGGSLRLSCAASGFTFSSYDMHWVRQATGKGLEWVSAIGTAGDTYYPGSVKGRFTISRENAKNSLYLQMNSLRAGDTAVYYCARAWELDAFDIWGQGTMVTVSS

SEQ ID NO: 819 - protein, 117 aa, synthetic construct
EVQLVESGGGLVQPGGSLRLSCAASGFTFSSYAMSWVRQAPGKGLEWVSAISGSGGSTYYADSVKGRFTISRDNSKNTLYLQMNSLRAEDTAVYYCAKDNWNYFDYWGQGTLVTVSS

SEQ ID NO: 820 - protein, 117 aa, synthetic construct
QVQLVESGGGVVQPGRSLRLSCAASGFTFSSYGMHWVRQAPGKGLEWVAVIWYDGSNKYYADSVKGRFTISRDNSKNTLYLQMNSLRAEDTAVYYCARVYNWIFDYWGQGTLVTVSS

SEQ ID NO: 821 - protein, 117 aa, synthetic construct
EVQVMESGGGLVKPGGSLRLSCAASGFSFSSHSLNWVRQAPGKGLEWVSSISGISNYIAYADSVRGRFTISRDNAKNSLFLQMNSLRAEDTGVYYCARITVVSFDYWGQGTLVTVTS

SEQ ID NO: 822 - protein, 117 aa, synthetic construct
EVQLVESGGGLVQPGGSLRLSCAASGFTFSSYAMSWVRQAPGKGLEWVSAISGSGGNTYNADSVKGRFTISRDNSKNTLYLQMNSLRAEDTAVYYCAKAAAGKGDYWGQGTLVTVSS

SEQ ID NO: 823 - protein, 117 aa, synthetic construct
QVQLVQSGAEVKKPGASVKVSCKASGYTFTSYYIHWVRQAPGQGLEWMGIINPSGGTTNYAQKFQGRVTMTRDTSTSTVYMELSSLRSEDTAVYYCARGDWGTMDVWGKGTTVTVSS

SEQ ID NO: 824 - protein, 117 aa, synthetic construct
EVQLVESGGGLVQPGGSLRLSCAASGFTFSSYWMSWVRQAPGKGLEWVANIKQDGSEKYYVDSVKGRFTISRDNAKNSLYLQMNSLRAEDTAVYYCARDGTGWFDPWGQGTLVTVSS

SEQ ID NO: 825 - protein, 117 aa, synthetic construct
QVQLVQSGAEVKKPGASVKVSCKASGYTFTSYGISWVRQAPGQGLEWMGWISAYNGNTNYAQKLQGRVTMTTDTSTSTAYMELRSLRSDDTAVYYCARRGTVVFDYWGQGTLVTVSS

SEQ ID NO: 826 - protein, 117 aa, synthetic construct
QVQLVQSGAEVKKPGASVKVSCKASGYTFTNYGISWVRQAPGQGLEWMGWISAYNGNTNYAQNLQGRVTMTTDTSTSTAYMELRSLRSDDTAVYYCARPLSGTLDNWGQGTLVTVSS

SEQ ID NO: 827 - protein, 118 aa, synthetic construct
EVQLVESGGGLVQPGGSLRLSCAASGFTFSSYSMNWVRQAPGKGLEWVSYISSSSSTIYYADSVKGRFTISRDNAKNSLYLQMNSPRDEDTAVYYCARESIAALFDYWGQGTLVTVSS

SEQ ID NO: 828 - protein, 118 aa, synthetic construct
EVQLVESGGGLVQPGGSLRLSCAASGFTFSSYDMHWVRQATGKGLEWVSAIGTAGDTYYPGSVKGRFTISRENAKNSLYLQMNSLRAGDTAVYYCARGDHSYGGLDYWGQGTLVTVSS

SEQ ID NO: 829 - protein, 118 aa, synthetic construct
QVQLVQSGAEVEKPGASVKVSCKASGYTFTSYDIYWVRQATGQGLEWMGWMIPNSGNTGYAQRFEDRVTMTRSTSMNTAYMELNSLRSEDTAVYYCARGDWAWSFDLWGRGTLVTVSS

SEQ ID NO: 830 - protein, 118 aa, synthetic construct
QVQLVQSGAEVKKPGASVKVSCKASGYTFTSYYMHWVRQAPGQGLEWMGIINPSGGSTSYAQKFQGRVTMTRDTSTSTVYMELSSLRSEDTAVYYCARGLRRDWFDPWGQGTLVTVSS

SEQ ID NO: 831 - protein, 118 aa, synthetic construct
EVQLVESGGGLVKPGGSLRLSCAASGFTFSNAWMSWVRQAPGKGLEWVGRIKSKTDGGTTDYAAPVKGRFTISRDDSKNTLYLQMNSLKTEDTAVYYCTTGTGRSDYWGQGTLVTVSS

SEQ ID NO: 832 - protein, 118 aa, synthetic construct
QVQLVESGGGVVQPGRSLRLSCAASGFTFSNYGMHWVRQAPGKGLDWVAVIWYDGNNEYYADSVKDRFTISRDNSQNTLYLQMNSLRAEDRAVYYCVRGGVGDGFDMWGQGTMVTVSS

SEQ ID NO: 833 - protein, 118 aa, synthetic construct
QVQLVESGGGVVQPGRSLRLSCAASGFTFSSYGMHWVRQAPGKGLEWVAVIWYDGSNKYYADSVKGRFTISRDNSKNTLYLQMNSLRAEDTAVYYCASVGSYGYFQHWGQGTLVTVSS

SEQ ID NO: 834 - protein, 118 aa, synthetic construct
EVQLVESGGGVVRPGGSLRLSCAASGFTFDDYGMSWVRQAPGKGLEWVSGINWNGGSTGYADSVKGRFTISRDNAKNSLYLQMNSLRAEDTALYYCARKGNWNSFDYWGQGTLVTVSS

SEQ ID NO: 835 - protein, 118 aa, synthetic construct
EVQLVESGGGLVKPGGSLRLSCAASGFTFSSYSMNWVRQAPGKGLEWVSSISSSSSYIYYADSVKGRFTISRDNAKNSLYLQMNSLRAEDTAVYYCARDSAYYTFDYWGQGTLVTVSS

SEQ ID NO: 836 - protein, 118 aa, synthetic construct
EVQLVESGGGLVQPGGSLRLSCAASGFTFSSYAMSWVRQAPGKGLEWVSAISGSGGSTYYADSVKGRFTISRDNSKNTLYLQMNSLRAEDTAVYYCGSGWYEGAFDYWGQGTLVTVSS

SEQ ID NO: 837 - protein, 119 aa, synthetic construct
EVQLVESGGGLVQPGGSLRLSCAASGFTFSSYDMHWVRQATGKGLEWVSAIGTAGDTYYPGSVKGRFTISRENAKNSLYLQMNSLRAGDTAVYYCARDRDSSHDAFDIWGQGTMVTVSS

SEQ ID NO: 838 - protein, 119 aa, synthetic construct
EVQLVESGGGVVRPGGSLRLSCAASGFPFDDFGLNWVRQAPGKGLEWVSGINWNGGTTTYADSVKGRFTISRDNAKKSLYLQMSSLRVEDTALFYCVRDEIWNYYFDYWGQGTLVTVSS

SEQ ID NO: 839 - protein, 119 aa, synthetic construct
EVQMVESGGGRVKPGGSLRLSCTASGFSISINNMNWVRQAPGKGLEWVSSISSSSTYIYYADSVKGRFTISRDNAENSLYLQMNSLRAEDTGVYYCARDSYDFHAFDIWGQGTMVTVSS

SEQ ID NO: 840 - protein, 119 aa, synthetic construct
EVQLVESGGGLVQPGGSLRLSCAASGFTFSSYWMHWVRQAPGKGLVWVSRINSDGSSTSYADSVKGRFTISRDNAKNTLYLQMNSLRAEDTAVYYCARVGWGGHAFDIWGQGTMVTVSS

SEQ ID NO: 841 - protein, 119 aa, synthetic construct
EVQLVESGGGLVKPGGSLRLSCAASGFTFSTYSMNWVRQAPGKGLEWVSSISSSSTYIYYADSVKGRFTISRDNAKNSLYLQMNSLRAEDTAVYYCARGYNWNYVGDYWGQGTLVTVSS

SEQ ID NO: 842 - protein, 119 aa, synthetic construct
EVQLVESGGGLVQPGGSLRLSCAASGFTFSSYAMSWVRQAPGKGLEWVSAISGSGGSTYYADSVKGRFTISRDNSKNTLYLQMNSLRAEDTAVYYCAKDANWGYAFDIWGQGTMVTVSS

SEQ ID NO: 843 - protein, 120 aa, synthetic construct
QVQLVQSVSEVNKPGASVKVSCKASGYTFTTYGISWVRQAPGQGLEWMGWISGYSGYTSYAQKFQGRLTMTTDTSANTAYMELRSLRSDDTAVYYCARRFIWNYGDFDYWGQGTLVTVSS

SEQ ID NO: 844 - protein, 120 aa, synthetic construct
EVQLVESGGDLVQPGGSLRLSCAASGFTFSSYSMNWVRQAPGKGLEWVSYISRSSGTIYYADSVKGRFTISRDNAKNSLYLQMNSLRDEDTAVYYCARGRLGIEDYFDYWGQGTLVTVSS

SEQ ID NO: 845 - protein, 120 aa, synthetic construct
EVQLVESGGGLVQPGGSLRLSCAASGFTFNRYNMNWVRQAPGKGLEWVSYISSSSDTIYYADSVKGRFTISRDNAKNSLYLQMNSLRDEDTAMYYCARECYSSSWAFDYWGQGTLVTVSS

SEQ ID NO: 846 - protein, 120 aa, synthetic construct
QVQLQESGPGLVKPSGTLSLTCAISGGSISSSNWWSWVRQPPGKGLEWIGEIYHSGSTNFNPSLKSRVTISVDKSKNQFSLHLSSVTAADTAVYYCARDVGVDGRGFDYWGQGIVVIVSS

SEQ ID NO: 847 - protein, 120 aa, synthetic construct
EVQLVESGGGLVQPGGSLRLSCGVSGFTFSIYWMSWVRQAPGKGLEWVANINLDGSEKYHVDSVKGRFTISRDNAKNSLFLQMTSLRAEDTAVYYCARDILWSGGYLDVWGKGTTVTVSS

SEQ ID NO: 848 - protein, 120 aa, synthetic construct
EVQLVESGGGLVQPGGSLRLSCAASGFTFSGYWMTWVRQAPGKGLEWVANIKHDGSEKYYVDSVKGRFTISRDNAQNSLYLQMNSLRAEDTAVYYCARKQLWLNWYFDFWGRGILVTVSS

SEQ ID NO: 849 - protein, 120 aa, synthetic construct
QVQLVQSGAEVKKPGASVKVSCKASGYTFTTYGISWVRQAPGQGLEWMGWISAFNGNTNYAQNLQGRVTMTTDTSTSTAYMELRSLRSDDTAVYYCARENNWNYGWFDPWGQGTLVTVSS

SEQ ID NO: 850 - protein, 120 aa, synthetic construct
EVQLVESGGGLVQPGGSLRLSCAASGFTFSSYDMHWVRQATGKGLEWVSAIGTAGDTYYPGSVKGRFTISRENAKNSLYLQMNSLRAGDTAVYYCAREGYGDYPLPMDVWGKGTTVTVSS

SEQ ID NO: 851 - protein, 120 aa, synthetic construct
EVQLVESGGGLVKPGGSLRLSCAASGFTFSNAWMSWVRQAPGKGLEWVGRIKSKTDGGTTDYAAPVKGRFTISRDDSKNTLYLQMNSLKTEDTAVYYCTTDNWNSYFDYWGQGTLVTVSS

SEQ ID NO: 852 - protein, 120 aa, synthetic construct
EVQLVESGGGLVQPGGSLRLSCAASGFTFSSYAMSWVRQAPGKGLEWVSAISGGGGSTYYADSVKGRFTISRDNSKNTLYLQMNSLRAEDTAVYYCAGNSGYDSPYFDYWGQGTLVTVSS

SEQ ID NO: 853 - protein, 120 aa, synthetic construct
QVQLVESGGGVVQPGRSLRLSCAASGFTFSSYGMHWVRQAPGKGLEWVAVIWYDGSNKYYADSVKGRFTISRDNSKNTLYLQMNSLRAEDTAVYYCAREYSSSSDWFDPWGQGTLVTVSS

SEQ ID NO: 854 - protein, 120 aa, synthetic construct
EVQLVESGGGLVKPGGSLRLSCAASGFTFSSYSMNWVRQAPGKGLEWVSSISSSSSYIYYADSVKGRFTISRDNAKNSLYLQMNSLRAEDTAVYYCARDGGITGRYFDLWGRGTLVTVSS

SEQ ID NO: 855 - protein, 120 aa, synthetic construct
EVQLVESGGGLVKPGGSLRLSCAASGFTFSSYSMNWVRQAPGKGLEWVSSISSSSSYIYYADSVKGRFTISRDNAKNSLYLQMNSLRAEDTAVYYCAREGNWGPYYFDYWGQGTLVTVSS

SEQ ID NO: 856 - protein, 120 aa, synthetic construct
QVQLVQSGAEVKKPGASVKVSCKASGYTFTGYYMHWVRQAPGQGLEWMGWINPNSGGTNYAQKFQGRVTMTRDTSISTAYMELSRLRSDDTAVYYCARGVWSGYYTFDPWGQGTLVTVSS

SEQ ID NO: 857 - protein, 120 aa, synthetic construct
EVQLVESGGGLVKPGGSLRLSCAASGFTFSNAWMSWVRQAPGKGLEWVGRIKSKTDGGTTDYAAPVKGRFTISRDDSKNTLYLQMNSLKTEDTAVYYCTPHSSSPVFDYWGQGTLVTVSS

SEQ ID NO: 858 - protein, 121 aa, synthetic construct
QVQLVQSGAEVKKPGASVKVSCKASGYTFTGYYMHWVRQAPGQGLEWMGWINPNSGGTNYAQKFQGRVTMTRDTSISTAYMELSRLRSDDTAVYYCARDDTGTTGGYFQHWGQGTLVTVSS

SEQ ID NO: 859 - protein, 121 aa, synthetic construct
QVQLVQSGAEVKKPGASVKVSCKASGYTFTSYDINWVRQATGQGLEWMGWMNPNSGNTGYAQKFQGRVTMTRNTSISTAYMELSSLRSEDTAVYYCARAVAVAGTGWFDPWGQGTLVTVSS

SEQ ID NO: 860 - protein, 121 aa, synthetic construct
EVQLVESGGGLVKPGGSLRLSCAASGFTFSNAWMSWVRQAPGKGLEWVGRIKSKTDGGTTDYAAPVKGRFTISRDDSKNTLYLQMNSLKTEDTAVYYCTTNYGDYVGFDYWGQGTLVTVSS

SEQ ID NO: 861 - protein, 121 aa, synthetic construct
EVHLVESGGGLVQPGGSLRLSCAASGFTFSGYWMSWVRQAPGKGLEWVANIKQDGSDKYYVDSVKGRFTISRDNAINSLFLQLTSLRAEDTAVYYCAREIDWNYGFHFDYWGQGTLITVSS

SEQ ID NO: 862 - protein, 121 aa, synthetic construct
QVQLVQSGAEVKKPGASVKVSCKASGYTFTSYDINWVRQATGQGLEWMGWMNPNSGNTGYAQKFQGRVTMTRNTSISTAYMELSSLRSEDTAVYYCARGYYDFWSGPFDYWGQGTLVTVSS

SEQ ID NO: 863 - protein, 121 aa, synthetic construct
QVQLVESGGGVVQPGRSLRLSCAASGFTFSSYGMHWVRQAPGKGLEWVAVIWYDGSNKYYADSVKGRFTISRDNSKNTLYLQMNSLRAEDTAVYYCARDSKWELLNWFDPWGQGTLVTVSS

SEQ ID NO: 864 - protein, 121 aa, synthetic construct
QVQLQESGPGLVKPSETLSLTCTVSGGSISDYYWNWIRQPPGKGLEWIGYISSRGRTNYNPSLKSRVTLSVDSSKNQFSLKLTSVTAADTAVFYCARGRHFDWLLSYFDYWGQGTLVTVSS

SEQ ID NO: 865 - protein, 121 aa, synthetic construct
EVQLVESGGGLVKPGGSLRLSCAASGFTFSSDNMNWVRQAPGKGLEWVSSIGSSSSYIYYADSVKGRFTISRDNAKNSLYLQMNSLRAEDTAVYYCARDRAIVGATWFDPWGQGTLVIVSS

SEQ ID NO: 866 - protein, 121 aa, synthetic construct
EVQLVESGGGLVKPGGSLRLSCAASGFTFSSYSMNWVRQAPGKGLEWVSSISSSSSYIYYADSVKGRFTISRDNAKNSLYLQMNSLRAEDTAVYYCARDRYNWNYRYFDLWGRGTLVTVSS

SEQ ID NO: 867 - protein, 121 aa, synthetic construct
EVQLVESGGGLVKPGGSLRLSCAASGFTFSSYSMNWVRQAPGKGLEWVSSISSSSSYIYYADSVKGRFTISRDNAKNSLYLQMNSLRAEDTAVYYCARDSHDYGDSYFDYWGQGTLVTVSS

SEQ ID NO: 868 - protein, 121 aa, synthetic construct
QVQLVQSGAEVKKPGASVKVSCKASGYTFTSYGISWVRQAPGQGLEWMGWISAYNGNTNYAQKLQGRVTMTTDTSTSTAYMELRSLRSDDTAVYYCARDGAARPPRYMDVWGKGTTVTVSS

SEQ ID NO: 869 - protein, 121 aa, synthetic construct
QVQLVQSGAEVRKPVASVKVSCKASGYTFTDHSIHWVRQAPGQGLEWMGSINPNSGGTNYAQKFQGRVTMTRDTYNCTAYMELSRLRSDDTAVYYCARSDSGSHYVFFDDWGQGTLVTVSS

SEQ ID NO: 870 - protein, 121 aa, synthetic construct
QVQLVQSGSEVKKPGASVKVSCKASGYTFTGYYMYWVRQAPGQGLEWMGWINPNSGGTNYAQKFQDRVTMTRDTSISTAYMELSRLRSDDTAIYYCARDLDYYGSGNYDYWGQGTLVTVSS

SEQ ID NO: 871 - protein, 121 aa, synthetic construct
EVQLVESGGGLVQPGGSLRLSCAASGFTFSSYWMHWVRQAPGKGLVWVSRVNSDGSNTTYADSVKGRFTISRDNAKNTLYLQMNSLRAEDTAVYYCARNRDYHGSGSFDYWGQGTLVTVSS

SEQ ID NO: 872 - protein, 120 aa, synthetic construct
QVQLQQSGPGLVKPSQTLSLTCAISGDNVSSNSAAWNWIRQSPSRGLEWLGRTYYRSKWYNDYAVSVKSRITINPDTSKNQFSLHLNSVTPEDTALYYCARDWNFAFDIWGQGTMVTVSS

SEQ ID NO: 873 - protein, 121 aa, synthetic construct
QVQLVQSGAEVKKPGASVKVSCKASGYTFTSYGITWVRQAPGQGLEWMGWISAYNGNTHYAQKLQGRVTMTTDTSTSTAYMDLRSLRSDDTAVYYCARTIFGVVNNWFDPWGQGTLVTVSS

SEQ ID NO: 874 - protein, 121 aa, synthetic construct
QVQLVQSGAEVKKPGASVKVSCKASGYTFTGYYMHWVRQAPGQGLEWMGWINPNSGGTNYAQKFQGRVTMTRDTSISTAYMELSRLRSDDTAVYYCARDGEQLALNWFDPWGQGTLVTVSS

SEQ ID NO: 875 - protein, 121 aa, synthetic construct
EVQLVESGGGLVKPGGSLRLSCAASGFTFSRYSMNWVRQAPGKGLEWVSSIISSTSYIYYADSVKGRFTISRDNAKNSLYLQMNSLRAEDTAVYYCARETPVTLFDAFDIWGQGTMVTVSS

SEQ ID NO: 876 - protein, 121 aa, synthetic construct
EVHLVESGGGLVQPGRSLRLSCAASGFTFDEYAMHWVRQVPGKGLEWVSGISWNSGSIGYADSVKGRFTISRDNAKNSLYLQMNSLRAEDTALYYCAKDIFTGRAGYFDYWGQGTLVTVSS

SEQ ID NO: 877 - protein, 121 aa, synthetic construct
QVQLVESGGGVVQPGRSLRLSCAASGFTFSSYGMHWVRQAPGKGLEWVAVIWYDGSNKYYADSVKGRFTISRDNSKNTLYLQMNSLRAEDTAVYYCARAITGTTGNWFDPWGQGTLVTVSS

SEQ ID NO: 878 - protein, 121 aa, synthetic construct
QITLKESGPTLVKPTQTLTLTCTFSGFSISTSGVGVGWIRQPPGKALEWLAFIFWNDDKRYSPSLKSRLTITKDTSKNQVVLTMTNMDPVDTATYYCTHTEYGSSWSVDYWGQGTLVTVSS

SEQ ID NO: 879 - protein, 121 aa, synthetic construct
EVQLVESGGGVVRPGGSLRLSCAASGFTFDDYGMSWVRQAPGKGLEWVSGINWNGGSTGYADSVKGRFTISRDNAKNSLYLQMNSLRAEDTALYYCARHFDWLLSNAFDIWGQGTMVTVSS

SEQ ID NO: 880 - protein, 122 aa, synthetic construct
QVQLVQSGAEVKKPGASVKVSCKASGYTFTSYDINWVRQATGQGLEWMGWMNPNSGNTGYAQKFQGRVTMTRNTSISTAYMELSSLRSEDTAVYYCVRRITVVRGVISLDYWGQGTLVTVSS

SEQ ID NO: 881 - protein, 122 aa, synthetic construct
EVQLVESGGGLVKPGGSLRLSCAASGFTFSSYSMNWVRQAPGKGLEWVSSISSSSSYIYYADSVKGRFTISRDNAKNSLYLQMNSLRAEDTAVYYCARETYYYDSSGYFDYWGQGTLVTVSS

SEQ ID NO: 882 - protein, 123 aa, synthetic construct
EVQLVESGGGLVQPGGSLRLSCAASGFTFSSYWMSWVRQAPGKGLEWVANIKQDGSEKYYVDSVKGRFTISRDNAKNSLYLQMNSLRAEDTAVYYCARDDTIFGVVTDAFDIWGQGTMVTVSS

SEQ ID NO: 883 - protein, 122 aa, synthetic construct
QVQLQQSGPGLVKPSQTLSLTCAISGDSVSSNSAAWNWIRQSPSRGLEWLGRTYYRSKWYNDYAVSVKSRITINPDTSKNQFSLQLNSVTPEDTAVYYCARGVGARGWFDPWGQGTLVTVSS

SEQ ID NO: 884 - protein, 123 aa, synthetic construct
EVQLVESGGGLVKPGGSLRLSCAASGFTFSTYSMNWVRQAPGKGLEWVSSISSSSTYIYYADSVKGRFTISRDNAKNSLYLQMNSLRADDTAVYYCARDPPLSGSYAGEFDYWGQGTLVTVSS

SEQ ID NO: 885 - protein, 123 aa, synthetic construct
QVTLRESGPALVKPTQTLTLTCTFSGFSLSTSGMCVSWIRQPPGKALEWLALIDWDDDKYYSTSLKTRLTISKDTSKNQVVLTMTNMDPVDTATYYCARRRGYSYGWGDFDYWGQGTLVTVSS

SEQ ID NO: 886 - protein, 123 aa, synthetic construct
EVQLVESGGGLVQPGGSLRLSCAASEFIFRSYNMNWVRQAPGKGLEWVSYISISSRTIYYADSVKGRFTISRDNAKNSLFLQMNSLRDEDTAVYYCARGGLLNWNYEGWFDPWGQGTLVTVSS

SEQ ID NO: 887 - protein, 123 aa, synthetic construct
QVQLVESGGGLVKPGGSLRLSCAASGFTFSDYYMSWIRQAPGKGLEWVSYISSSGSTIYYADSVKGRFTISRDNAKNSLYLQMNSLRAEDTAVYYCARDGGIAARPDWYFDLWGRGTLVTVSS

SEQ ID NO: 888 - protein, 123 aa, synthetic construct
EVQLVESGGGLVQPGGSLRLSCAASGFTFSSYSMNWVRQAPGKGLEWVSYISSSSSTIYYADSVKGRFTISRDNAKNSLYLQMNSLRDEDTAVYYCARTYYYGSGSYYTLDYWGQGTLVTVSS

SEQ ID NO: 889 - protein, 123 aa, synthetic construct
QVQLVQSGAEVKKPGASVKVSCKASGYTFTSYDINWVRQATGQGLEWMGWMNPNSGNTGYAQKFQGRVTMTRNTSISTAYMELSSLRSEDTAVYYCARGGITIFGVVTPFDYWGQGTLVTVSS

SEQ ID NO: 890 - protein, 124 aa, synthetic construct
QVQLQESGPGLVKPSQTLSLTCTVSGGSISSGGYYWSWIRQHPGKGLEWIGYIYYSGSTYYNPSLKSRVTISVDTSKNQFSLKLSSVTAADTAVYYCARDALHYYGSGSAFDYWGQGTLVTVSS

SEQ ID NO: 891 - protein, 124 aa, synthetic construct
EVQLVESGGGLVQPGGSLRLSCAASGFTFSSYWMSWVRQAPGKGLEWVANIKQDGSEKYYVDSVKGRFTISRDNAKNSLYLQMNSLRAEDTAVYYCAREGVLWFGEFYYYMDVWGKGTTVTVSS

SEQ ID NO: 892 - protein, 124 aa, synthetic construct
EVQLVESGGGLVQPGGSLRLSCAASGFTFSSYSMNWVRQAPGKGLEWVSYISSSSSTIYYADSVKGRFTISRDNAKNSLYLQMNSLRDEDTAVYYCARDGDYYDSSGYYHFDYWGQGTLVTVSS

SEQ ID NO: 893 - protein, 124 aa, synthetic construct
EVQLVESGGGLVQPGGSLRLSCAASGFTFSSYAMSWVRQAPGKGLEWVSAISGSGGSTYYADSVKGRFTISRDNSKNTLYLQMNSLRAEDTAVYYCAKDRGGENWNYGGWFDPWGQGTLVTVSS

SEQ ID NO: 894 - protein, 124 aa, synthetic construct
QVHLVESGGGVVQPGRSLRLSCAASGFTFSSYGMHWVRQAPGKGLEWVAIIWYDGSNEYYADSVKGRFTISRDNSKNTLYLQMNTLRAEDTAVYYCAGAYYYDSSGYLNYMDVWGKGTTVTVSS

SEQ ID NO: 895 - protein, 124 aa, synthetic construct
EVQLVESGGGLVKPGGSLRLSCAASGFTFRNAWMSWVRQAPGKGLEWVGRIKTKTDGGATQYAAPVKGRFTISRDDSKNTLYLQMNSLKTEDTAVYYCTTDHIEYSSLYYFDYWGQGTLVTVSS

SEQ ID NO: 896 - protein, 124 aa, synthetic construct
QVQLVQSGAEVKKPGASVKVSCKASGYTFTSYGISWVRQAPGQGLEWMGWISAYNGNTNYAQKLQGRVTMTTDTSTSTAYMELRSLRSDDTAVYYCARQLAYCGGDCYLYFDYWGQGTLVTVSS

SEQ ID NO: 897 - protein, 123 aa, synthetic construct
QVQLQQSGPGLVKPSQTLSLTCAISGDSVSSNSAAWNWIRQSPSRGLEWLGRTYYRSKWYNDYAVSVKSRITINPDTSKNQFSLQLNSVTPEDTAVYYCAREAYWNYGGFDYWGQGTLVTVSS

SEQ ID NO: 898 - protein, 125 aa, synthetic construct
EVQLVESGGGLVKPGGSLKLSCAASGFTFSSYSMNWVRQAPGKGLEWVSSISSSSSYIYYADSVKGRFTISRDNAKNSLYLQMNSLRAEDTAVYYCARDGRITMVRGVRNWFDPWGQGTLVTVSS

SEQ ID NO: 899 - protein, 125 aa, synthetic construct
EVQLVESGGGLVQPGGSLRLSCAASGFTFSSYSMNWVRQAPGKGLEWVSYISSSTSTIYYADSVKGRFTISRDNAKNSLYLQMNSLTDEDTAVYYCARMSSQLELHYYCYYMDVWGKGTTVTVSS

SEQ ID NO: 900 - protein, 125 aa, synthetic construct
EVQLVESGGGLVKPGGSLRLSCAASGFTFSNAWMSWVRQAPGKGLEWVGRIKSKTDGGTTDYAAPVKGRFTISRDDSKNTLYLQMNSLKTEDTAVYYCTTDLGYSGYDWGAFDYWGQGTLVTVSS

SEQ ID NO: 901 - protein, 124 aa, synthetic construct
QVQLQQSGPGLVKPSQTLSLTCAISGDSVSSNSAAWNWIRQSPSRGLEWLGRTYYRSKWYNDYAVSVKSRITINPDTSKNQFSLQLNSVTPEDTAVYYCARDRVNWNDVGFDYWGQGTLVTVSS

SEQ ID NO: 902 - protein, 125 aa, synthetic construct
EVQLVESGGGLVQPGGSLRLSCAASGFTFSSYWMSWVRQAPGKGLEWVANIKQDGSEKYYVDSVKGRFTISRDNAKNSLYLQMNSLRAEDTAVYYCARTPGYSSSWYEGPYFDYWGQGTLVTVSS

SEQ ID NO: 903 - protein, 118 aa, synthetic construct; identical to SEQ ID NO: 318

SEQ ID NO: 904 - protein, 118 aa, synthetic construct
QLQLQESGPGLVKPSETLSLTCTVSGGSISTRSYYWGWLRQPPGKGLEWIGTFYYSGSTYYNPSLKSRVSISVDTSKNQFSLQLSSVTAADTAVYYCAREDLIGNDYWGQGTLVTVSS

SEQ ID NO: 905 - protein, 118 aa, synthetic construct
QVQLQQWGAGLLKPSETLSLTCAVYGGSFSGHYWNWIRQPPGKGLEWIGEINHSGFTNYNPSLKSRVTISVDTPKNQFPLNLSSVTAADTAVYYCAREGLTGHVFDIWGQGTMVTVSS

SEQ ID NO: 906 - protein, 118 aa, synthetic construct
QVQLQQWGAGLLKPSETLSLTCAVYGGFLRGYYWSWIRQPPGKGLEWIGEINHSGSTNYNPSLKSRVTISVDTAENQFSLKLNSVTAADTAVYYCAREGLTGHTFDIWGQGTMVTVSS

SEQ ID NO: 907 - protein, 126 aa, synthetic construct
QVQLVQSGAEVKKPGASVKVSCKASGYIFSNYGICWVRQAPGQGLEWMGWINPYNVNRNYAQSLQGRVTMTTDTSTNSAYMELRSLKSDDTAVYFCARGVWGSYRSHSYYTFMDVWGKGTTVTVSS

SEQ ID NO: 908 - protein, 126 aa, synthetic construct
EVQLVESGGGLVKPGGSLRLSCAASGFTFSSYSMNWVRQAPGKGLEWVSSISSSSSYIYYADSVKGRFTISRDNAKNSLYLQMNSLRAEDTAVYYCARDYRPYYDILTGYSHFDYWGQGTLVTVSS

SEQ ID NO: 909 - protein, 126 aa, synthetic construct
QVQLVQSGAEVKKPGASVKVSCKASGFTFTSYYIHWVRQAPGQGLEWMGIITPSGGTTSYAQKFQGRVTMTRDTSTSTVYMELSSLRSEDTAVYYCARRVLWFGELRDYFYYMDVWGKGTTVTISS

SEQ ID NO: 910 - protein, 126 aa, synthetic construct
QMQLQESGPGLVRPSETLSLTCTVSGGSISTRSYYWGWIRQPPGKGLEWIGSVFYSGSTYYNPSLKSRVAISVDTSKNQFSLKVNSVTAADTAVFYCVRQGYDSWTGYSFFYFDYWGQGTLVTVSS

SEQ ID NO: 911 - protein, 119 aa, synthetic construct
QVQLQQWGAGLLKPSETLSLTCAVYGGSFSVYYWSWIRQPPGKGLEWIGEINHSGSTNYNPSLKSRVTISVDTSKNQFSLKLSSVTAADTAVYYCARGGGYSFGGFDYWGQGTLVTVSS

SEQ ID NO: 912 - protein, 120 aa, synthetic construct
QLQLQESGPGLVKPSETLALTCTVSGGSISSIIYYWGWIRQPPGKGLEWIGNVYYSGSIYYNPSLKSRVTISVDTSKNQFSLKLSSVTAADTAVYYCARQNWGSDAFDIWGQGTMVTVSS

SEQ ID NO: 913 - protein, 120 aa, synthetic construct
QVQLQQWGAGLLKPSETLSLTCAVYGGSFSGYYWSWIRQPPGKGLEWIGEINHSGNTNYNPSLKSRVTISVDTSKNQFSLKLSSVTAADTAVYYCARGELGIGYWYFDLWGRGTLVTVSS

SEQ ID NO: 914 - protein, 120 aa, synthetic construct
QVQLQQWGAGLLKPSETLSLTCAVYGGSFSGYYWSWIRQPPGKGLEWIGEINHSGSTNYNPSLKSRVTISVDTSKNQFSLKLSSVTAADTAVYYCAREGGTTHEPLFDYWGQGTLVTVSS

SEQ ID NO: 915 - protein, 132 aa, synthetic construct
QVQLVQSGAEVKKPGASMKVSCKASGYTFITYGITWVRQAPGQGLEWMGWISAYNGNANYAQKVQDRVTMTTDTSTSTAYMELRSLRSDDTAVYYCARAPGGSCGSTNCYKWNYDPYYFDYWGQGTLVTVSS

SEQ ID NO: 916 - protein, 132 aa, synthetic construct
QVQLVQSGAEVKKPGASVKVSCKASGYTFITYGISWVRQAPGQGLEWMGWISSYNGNTNYAQKLQGRVTMTRDTSTSTAYMELRSLRSDDTAVYYCARAPGGDCSSTSCYKWNYDPYYFDYWGQGTLVTVSS

SEQ ID NO: 917 - protein, 106 aa, synthetic construct; identical to SEQ ID NO: 494

SEQ ID NO: 918 - protein, 110 aa, synthetic construct; identical to SEQ ID NO: 391

SEQ ID NO: 919 - protein, 110 aa, synthetic construct; identical to SEQ ID NO: 404

SEQ ID NO: 920 - protein, 110 aa, synthetic construct; identical to SEQ ID NO: 349

SEQ ID NO: 921 - protein, 106 aa, synthetic construct; identical to SEQ ID NO: 665

SEQ ID NO: 922 - protein, 110 aa, synthetic construct; identical to SEQ ID NO: 442

SEQ ID NO: 923 - protein, 108 aa, synthetic construct; identical to SEQ ID NO: 364

SEQ ID NO: 924 - protein, 110 aa, synthetic construct; identical to SEQ ID NO: 480

SEQ ID NO: 925 - protein, 115 aa, synthetic construct; identical to SEQ ID NO: 359

SEQ ID NO: 926 - protein, 108 aa, synthetic construct; identical to SEQ ID NO: 505

SEQ ID NO: 927 - protein, 106 aa, synthetic construct
SYELTQPPSVSVSPGQTASITCSGDKLGDKYACWYQQKPGQSPVLVIYQDSKRPSGIPERFSGSNSGNTATLTISGTQAMDEADYYCQAWDSSNVVFGGGTKLTVL

SEQ ID NO: 928 - protein, 106 aa, synthetic construct; identical to SEQ ID NO: 494

SEQ ID NO: 929 - protein, 106 aa, synthetic construct
SYELTQPLSVSVALGQTARITCGGNNIGSKNVHWYQQKPGQAPVLVIYRDSNRPSGIPERFSGSNSGNTATLTISRAQAGDEADYYCQVWDSSTWVFGGGTKLTVL

SEQ ID NO: 930 - protein, 106 aa, synthetic construct; identical to SEQ ID NO: 338

SEQ ID NO: 931 - protein, 109 aa, synthetic construct; identical to SEQ ID NO: 348

SEQ ID NO: 932 - protein, 109 aa, synthetic construct
QAVVTQEPSLTVSPGGTVTLTCGSSTGAVTSGHYPYWFQQKPGQAPRTLIYDTSNKHSWTPARFSGSLLGGKAALTLSGAQPEDEAEYYCLLSYSGAWVFGGGTKLTVL

SEQ ID NO: 933 - protein, 110 aa, synthetic construct; identical to SEQ ID NO: 342

SEQ ID NO: 934 - protein, 111 aa, synthetic construct; identical to SEQ ID NO: 406

SEQ ID NO: 935 - protein, 111 aa, synthetic construct
QSVLTQPPSVSGAPGQRVTISCTGSSSNIGAGYDVHWYQQLPGTAPKLLIYGNSNRPSGVPDRFSGSKSGTSASLAITGLQAEDEADYYCQSYDSSLSGYVFGTGTKVTVL

SEQ ID NO: 936 - protein, 114 aa, synthetic construct
QSALTQPASVSGSPGQSITISCTGTSSDVGGYNYVSWYQQHPGKAPKLMIYDVSKRPSGVSNRFSGSKSGNTASLTISGLQAEDEADYYCCSYAGRSTLGIDWVFGGGTKLTVL

SEQ ID NO: 937 - protein, 108 aa, synthetic construct
SYVLTQPPSVSVAPGKTARITCEGDNIGSESVHWYQQKPGQAPVLVIYFDSDRPSGIPERFSGSNSGITATLTISRVEAGDEADFYCQVWDNGSDHVVFGGGTKLTVL

SEQ ID NO: 938 - protein, 110 aa, synthetic construct; identical to SEQ ID NO: 335

SEQ ID NO: 939 - protein, 108 aa, synthetic construct; identical to SEQ ID NO: 369

SEQ ID NO: 940 - protein, 106 aa, synthetic construct; identical to SEQ ID NO: 338

SEQ ID NO: 941 - protein, 107 aa, synthetic construct; identical to SEQ ID NO: 429

SEQ ID NO: 942 - protein, 108 aa, synthetic construct
SYELTQPPSVSVSPGQTARITCSADALSKQYAYWYQQKPGQAPVLVIYKDSERPSGIPERFSGSSSGTTVTLTISGVQAEDEADYYCQSADSSGTNWVFGGGTKLTVL

SEQ ID NO: 943 - protein, 108 aa, synthetic construct; identical to SEQ ID NO: 369

SEQ ID NO: 944 - protein, 110 aa, synthetic construct; identical to SEQ ID NO: 349

SEQ ID NO: 945 - protein, 110 aa, synthetic construct
QSALTQPASVSGSPGQSITISCTGTSSDVGGYNYVSWYQQHPGKAPKLMIYEVSNRPSGVSNRFSGSKSGNTASLTISGLQAEDEADYSCSSYTISSTWVFGGGTKLTVL

SEQ ID NO: 946 - protein, 108 aa, synthetic construct; identical to SEQ ID NO: 369

SEQ ID NO: 947 - protein, 110 aa, synthetic construct
QSALTQPASVSGSPGQSITISCTGTSSDVGGYDYVSWYQQHPGKAPKFMISGVSNRPSGVSNRFSGSKSGNTASLTISGLQAEDEADYYCSSYTRSRTWVFGGGTKLTVL

SEQ ID NO: 948 - protein, 115 aa, synthetic construct
QAVLTQPASLSASPGASASLTCTLRSGINVGTYRIYWYQQKPGSPPQYLLRYKSDSDKQQGSGVPSRFSGSKDASANAGILLISGLQSEDEADYYCMIWHSSASVFGGGTKLTVL

SEQ ID NO: 949 - protein, 106 aa, synthetic construct; identical to SEQ ID NO: 381

SEQ ID NO: 950 - protein, 106 aa, synthetic construct; identical to SEQ ID NO: 338

SEQ ID NO: 951 - protein, 107 aa, synthetic construct
SYELTQPPSVSVSPGQTARITCSGDALPKKYAYWYQQKSGQAPVLVIYEDSKRPSGIPERFSGSSSGTMATLTISGAQVEDEADYYCYSTDSSGKGVFGGGTKLTVL

SEQ ID NO: 952 - protein, 108 aa, synthetic construct; identical to SEQ ID NO: 369

SEQ ID NO: 953 - protein, 108 aa, synthetic construct; identical to SEQ ID NO: 750

SEQ ID NO: 954 - protein, 108 aa, synthetic construct; identical to SEQ ID NO: 344

SEQ ID NO: 955 - protein, 108 aa, synthetic construct; identical to SEQ ID NO: 369

SEQ ID NO: 956 - protein, 108 aa, synthetic construct; identical to SEQ ID NO: 369

SEQ ID NO: 957 - protein, 110 aa, synthetic construct
QSALTQPASVSGSPGQSITISCTGTNNDVGYYNYVSWYQQHPDKAPKLMIYDVIKRPSGVSDRFSGSKSGNTASLTISGLQAEDEADYYCCSYAGSSTWVFGGGTKLSVL

SEQ ID NO: 958 - protein, 110 aa, synthetic construct
QSALTQPPSASGSPGQSVTISCTGTSSDVGGYNYVSWYQQHPGKAPKLMIYEVSKRPSGVPDRFSGSKSGNTASLTVSGLQAEDEADYYCSSYSGSNNYVFGTGTKVTVL

SEQ ID NO: 959 - protein, 110 aa, synthetic construct
QSALTQPASVSGSPGQSITISCTGTSSDVGNYNYVSWYQQHPGKVPKLMIYEVIYRPSGVSNRFSGSKSGNTASLTISGLQAEDEADYYCTSYTRNNTYVFGSGTKVTVL

SEQ ID NO: 960 - protein, 111 aa, synthetic construct; identical to SEQ ID NO: 491

SEQ ID NO: 961 - protein, 111 aa, synthetic construct; identical to SEQ ID NO: 343

SEQ ID NO: 962 - protein, 114 aa, synthetic construct
QSALTQPASVSGSPGQSITISCTGTSSDVGGYNYVSWYQQHPGKAPKLMIYDVSKRPSGVSNRFSGSKSGNTASLTISGLQAEDEADYYCCSYAGRSTLGIDWVFGGGTKLTVR

SEQ ID NO: 963 - protein, 108 aa, synthetic construct; identical to SEQ ID NO: 386

SEQ ID NO: 964 - protein, 108 aa, synthetic construct
SYELTQPPSVSVSLGQMARITCSGEALPKKYAYWYQQKPGQFPVLVIYKDSERPSGIPERFSGSSSGTIVTLTISGVQAEDEADYYCLSADSSGTYRVFGGGTKLTVL

SEQ ID NO: 965 - protein, 110 aa, synthetic construct
QSALTQPASVSGSPGQSITISCTGTSSDVGGYNYVSWYQQHPGKAPKLMIYEVSHRPSGVSNRFSGSKSGNTASLTISGLQAEDESDYYCSSYTSSSSLVFGGGTKLTVL

SEQ ID NO: 966 - protein, 110 aa, synthetic construct; identical to SEQ ID NO: 335

SEQ ID NO: 967 - protein, 110 aa, synthetic construct
QSALTQPRSVSGSPGQSVTISCTGTSSDVGGYNYVSWYQQHPGKAPKLMIYDVTTRPSGVPDRFSGSKSGNTASLTISGLQAEDEADYYCCSYSGSYTYVFGTGTKVTVL

SEQ ID NO: 968 - protein, 110 aa, synthetic construct
QSALTQPASVSGSPGQSITISCTGTSSDVGGYNYVSWYQQHPGKVPKLMIYEVSNRPSGVSNRFSGSKSGNTASLTISGLQAEDEADYYCISYTNTNTRVFGGGTKLTVL

SEQ ID NO: 969 - protein, 110 aa, synthetic construct; identical to SEQ ID NO: 335

SEQ ID NO: 970 - protein, 110 aa, synthetic construct; identical to SEQ ID NO: 403

SEQ ID NO: 971 - protein, 111 aa, synthetic construct
QSALTQPPSASGSPGQSVTISCTGTSSDVGGYNYVSWYQQHPGKAPKLMIYEVSKRPSGVPDRFSGSKSGNTASLTVSGLQAEDEADYYCSSYAGSNNFWVFGGGTKLTVL

SEQ ID NO: 972 - protein, 111 aa, synthetic construct
QSALTQPASVSGSPGQSITISCTGTSSDVGGYNYVSWYQQHPGKAPKLMIYEVSNRPSGVSNRFSGSKSGNTASLTISGLQAEDEADYYCSSYTSSSTYWVFGGGTKLTVL

SEQ ID NO: 973 - protein, 106 aa, synthetic construct; identical to SEQ ID NO: 371

SEQ ID NO: 974 - protein, 106 aa, synthetic construct; identical to SEQ ID NO: 381

SEQ ID NO: 975 - protein, 108 aa, synthetic construct; identical to SEQ ID NO: 369

SEQ ID NO: 976 - protein, 108 aa, synthetic construct; identical to SEQ ID NO: 344

SEQ ID NO: 977 - protein, 110 aa, synthetic construct; identical to SEQ ID NO: 349

SEQ ID NO: 978 - protein, 111 aa, synthetic construct; identical to SEQ ID NO: 657

SEQ ID NO: 979 - protein, 106 aa, synthetic construct
SYELTQPPSVSVSPGQTASITCSRDKLGDKYACWYQQKPGQSPVLVIYQDSKRPSGIPERFSGSNSGNTATLTISGTQAMDEADYYCQAWDSSTVVFGGGTKLTVL

SEQ ID NO: 980 - protein, 106 aa, synthetic construct
SYELTQPPSVSVSPGQTASITCSGDKLGDRYACWYQQKPGQSPVLVIYQGSKRPSGIPERFSGSNSGNTATLTISGTQAMDEADYYCQAWDSSTVVFGGGTKLTVL

SEQ ID NO: 981 - protein, 106 aa, synthetic construct
SSELTQDPAVSVALGQTVRITCQGDSLRSYYASWYQQKPGQAPVLVIYGKNNRPSGILDRFSGSSSGNTASLTITGAQAEDEGDYYCNSRDSSGWVFGGGTKLTVL

SEQ ID NO: 982 - protein, 107 aa, synthetic construct
SYELTQPPSVSVSPGQTANITCSGDKLENKYTCWYQQKPGQSPLVVIYQDNKRPSGIPERFSGSNSGNTATLTISGTQAMDEADYYCQAWDSTTAWVFGGGTKLTVL

SEQ ID NO: 983 - protein, 108 aa, synthetic construct
SSELTQDPAVSVALGQTVRITCQGDNIRNYYASWYQQKPGQAPLLVISGKNNRPSGIPDRFSGSSSGNTASLTITGAQAEDEAYYYCYSRDSSGSLWIFGGGTKLTVL

SEQ ID NO: 984 - protein, 108 aa, synthetic construct
SSELTQDPAVSVALGQTVRITCQGDSLRRYYASWYQQKPGQAPVLVIYGKDNRPSGIPDRFSGSSSGNTASLTITGTQAEDEADYYCNSRDSSGNHLVFGGGTKLTVL

SEQ ID NO: 985 - protein, 108 aa, synthetic construct; identical to SEQ ID NO: 750

SEQ ID NO: 986 - protein, 108 aa, synthetic construct; identical to SEQ ID NO: 369

SEQ ID NO: 987 - protein, 108 aa, synthetic construct; identical to SEQ ID NO: 369

SEQ ID NO: 988 - protein, 108 aa, synthetic construct; identical to SEQ ID NO: 369

SEQ ID NO: 989 - protein, 108 aa, synthetic construct
SYELTQPPSVSVSPGQTARITCSGDALPKKYAYWYQQKSGQAPVLVIYEDIKRPSGIPERFSGSSSGTMATLTISGAQVEDEADYYCYSTDSSGNHRVFGGGTKLTVL

SEQ ID NO: 990 - protein, 110 aa, synthetic construct; identical to SEQ ID NO: 340

SEQ ID NO: 991 - protein, 110 aa, synthetic construct
QSALTQPASVSGSPGQSITISCTGTSSDVGGYNYVSWYQQHPGKAPKLMIYDVSKRPSGVSNRFSGSKSGNTASLTISGLQAEDEADYYCCSYAGSSTVVFGGGTKLTVL

SEQ ID NO: 992 - protein, 110 aa, synthetic construct; identical to SEQ ID NO: 403

SEQ ID NO: 993 - protein, 110 aa, synthetic construct
QSALTQPASVSGSPGQSITISCTGTSSDVGGYNYVSWYQQHPGKAPKLMIYEVSNRPSGVSNRFSGSKSGNTASLTISGLQAEDEADYYCSSYTSSSHVVFGGGTKLTVL

SEQ ID NO: 994 - protein, 106 aa, synthetic construct; identical to SEQ ID NO: 371

SEQ ID NO: 995 - protein, 106 aa, synthetic construct; identical to SEQ ID NO: 371

SEQ ID NO: 996 - protein, 106 aa, synthetic construct; identical to SEQ ID NO: 338

SEQ ID NO: 997 - protein, 107 aa, synthetic construct
SYELTQPPSVSVSPGQTARITCSGDALPQKYAFWYQQKSGQAPVLVIYEDSERPSGIPERFSGSTSGTMATLTISGAQVEDEADYYCFSTDSSGNKVFGGGTKLTVL

SEQ ID NO: 998 - protein, 107 aa, synthetic construct; identical to SEQ ID NO: 450

SEQ ID NO: 999 - protein, 107 aa, synthetic construct; identical to SEQ ID NO: 450

SEQ ID NO: 1000 - protein, 108 aa, synthetic construct; identical to SEQ ID NO: 750

SEQ ID NO: 1001 - protein, 108 aa, synthetic construct
SSELTQDPAVSVALGQTVRITCQGDSLRNYYASWYQQKPGQAPILVIYGKNNRPSGIPDRFSGSSSGNTASLTITGAQAEDEADYYCNSRDSSYNHWVFGGGTKLTVL

SEQ ID NO: 1002 - protein, 108 aa, synthetic construct; identical to SEQ ID NO: 386

SEQ ID NO: 1003 - protein, 108 aa, synthetic construct; identical to SEQ ID NO: 369

SEQ ID NO: 1004 - protein, 108 aa, synthetic construct; identical to SEQ ID NO: 386

SEQ ID NO: 1005 - protein, 108 aa, synthetic construct; identical to SEQ ID NO: 374

SEQ ID NO: 1006 - protein, 108 aa, synthetic construct
SSELTQDPAVSVALGQTVRITCQGDSLRSYYASWYQQKPGQAPVLVIYGKNNRPSGIPDRFSGSSSGNTASLTITGAQAEDEADYYCNSRDSSDNHRVFGGGTKLTVL

SEQ ID NO: 1007 - protein, 108 aa, synthetic construct
SSELTQDPAVSVALGQTVRITCQGDSLRSYYASWYQQKPGQAPVLVIYGQNNRPSGIPDRFSGSSSGNTASLTITGAQAEDEADYYCNSRDSSGNHWVFGGGTKLTVL

SEQ ID NO: 1008 - protein, 108 aa, synthetic construct; identical to SEQ ID NO: 386

SEQ ID NO: 1009 - protein, 110 aa, synthetic construct
QSVLSQPPSVSEAPRQRVTISCSGSSSNIGYNAVNWYQQLPGKAPKLLISHDDLLPSGVSDRFSGSKSGTSASLAISGLQSDDEADYYCAAWDARLNGWVFGGGTKLTVL

SEQ ID NO: 1010 - protein, 110 aa, synthetic construct; identical to SEQ ID NO: 340

SEQ ID NO: 1011 - protein, 111 aa, synthetic construct
QSVLTQPPSVSGAPGQRVTISCTGSSSNIGARYDVHWYQLLPGSAPKLLIYDNSDRPSGVPDRFSGSRSGTSASLAITGLQAEDEADYFCQSYDSSLSGSVFGGGTKLTVL

SEQ ID NO: 1012 - protein, 111 aa, synthetic construct; identical to SEQ ID NO: 491

SEQ ID NO: 1013 - protein, 111 aa, synthetic construct
QSVLTQPPSVSGAPGQRVTISCTGSSSNIGAGYDVHWYQQLPGTAPKLLIHGNSNRPSGVPDRFSGSKSGTSASLAITGLQAEDETDYYCQSYDSSLSGWVFGGGTKLTVL

SEQ ID NO: 1014 - protein, 115 aa, synthetic construct
QAVLTQPASLSASPGASASLTCTLRSGINVGTSRIYWYQQKPGSPPQYLLRYKSDSDKHQDSGVPSRFSGSKDASANAGILLISGLQSEDEADYYCMIWHSSAVVFGGGTKLTVL

SEQ ID NO: 1015 - protein, 116 aa, synthetic construct
QAVLTQPASLSASPGASASLTCTLRSGINVGTYRIYWYQQKPGSPPQYLLRYKSDSDKQQGSGVPSRFSGSKDASANAGILLISGLQSEDEADYYCMIWHSSASVVFGGGTKLTVL

SEQ ID NO: 1016 - protein, 106 aa, synthetic construct
SYELTQPPSVSVSPGQTAIITCSGAKLGDKYACWYQKKPGQSPVMVIYQDRKRPSGIPERFSGSNSGNTATLTISGTQAMDEADYYCQAWDSSTAVFGGGTKLTVL

SEQ ID NO: 1017 - protein, 108 aa, synthetic construct; identical to SEQ ID NO: 369

SEQ ID NO: 1018 - protein, 106 aa, synthetic construct
SSELTQDPAVSVALGQTVRITCQGDSLRSYYASWYQQKPGQAPVLVIYGKNNRPSGIPDRFSGSSSGNTASLTITGAQAEDEADYYCNSRDSSGNLFGGGTKLTVL

SEQ ID NO: 1019 - protein, 106 aa, synthetic construct
SYELTQPPSVSVSPGQTASITCSGDKLGDKYACWYQQKPGQSPVLVIYQDSKRPSGIPERISGSNSGNTATLTISGTQAMDEADYYCQAWDSSTAVFGGGTKLTVL

SEQ ID NO: 1020 - protein, 108 aa, synthetic construct; identical to SEQ ID NO: 374

SEQ ID NO: 1021 - protein, 108 aa, synthetic construct; identical to SEQ ID NO: 369

SEQ ID NO: 1022 - protein, 108 aa, synthetic construct; identical to SEQ ID NO: 369

SEQ ID NO: 1023 - protein, 108 aa, synthetic construct; identical to SEQ ID NO: 369

SEQ ID NO: 1024 - protein, 111 aa, synthetic construct
QSVLTQPPSVSGAPGQRVTISCTGSSSNIGAGYDVHWYQQLPGTAPKLLIYGNSNRPSGVPDRFSGSKSGTSASLAITGLQAEDEADYYCQSYDSSLSGVVFGGGTKLTVL

SEQ ID NO: 1025 - protein, 115 aa, synthetic construct; identical to SEQ ID NO: 409

SEQ ID NO: 1026 - protein, 106 aa, synthetic construct; identical to SEQ ID NO: 371

SEQ ID NO: 1027 - protein, 108 aa, synthetic construct
SSELTQDPAVSVALGQTVRITCQGDSLRRYYASWYQQKPGQAPVLVIYGKNNRPSGIPDRFSGSSSGNTASLTITGAQAEDEADYYCNSRDSSGNHLVFGGGTKLTVL

SEQ ID NO: 1028 - protein, 108 aa, synthetic construct; identical to SEQ ID NO: 369

SEQ ID NO: 1029 - protein, 108 aa, synthetic construct; identical to SEQ ID NO: 369

SEQ ID NO: 1030 - protein, 108 aa, synthetic construct
SYVLIQPPSVSVAPGKTARITCGGNNIGGKSVHWYQLKPGQAPVLVICYNRDRPSGIPERFSGSNSGNTATLTISRVEAGDEADYYCQVWDSSSDHPVFGGGTKLTVL

SEQ ID NO: 1031 - protein, 109 aa, synthetic construct
QSVLTQSPSASGTPGQRVTISCSGSNSNIGFNTVNWYQQLPGTAPKLLIDSNNQRPSGVPDRFSGSTSGTSASLAISGLQSEDEADYYCSSYAGSNNFVFGTGTKVTVL

SEQ ID NO: 1032 - protein, 110 aa, synthetic construct; identical to SEQ ID NO: 341

SEQ ID NO: 1033 - protein, 111 aa, synthetic construct
QSALTQPPSASGSPGQSVTISCTGTSSDVGGYNYVSWYQQHPGKAPKLMIYEVSKRPSGVPDRFSGSKSGNTASLTVSGLQAEDEADYYCSSYAGSNNFGVFGGGTKLTVL

SEQ ID NO: 1034 - protein, 106 aa, synthetic construct
SYELTQPPSVSVSPGQTANITCSGDKLGNKYACWYQQKPGQSPVLVIFQDNKRPSGIPERFSGSNSGNTATLTIGGTQAMDEADYYCQAWDSSTVVFGGGTKVTVL

SEQ ID NO: 1035 - protein, 106 aa, synthetic construct
SYDLTQPPSVSVSPGQTASITCSGDKLGDKYACWYQQKPGQSPVLVIYQDIKRPSGIPERFSGSNSGNTATLTISGTQAMDEADYYCQAWDSSTVVFGGGTKLTVL

SEQ ID NO: 1036 - protein, 106 aa, synthetic construct
SYELTQPPSVSVSPGQTASITCSGDKLGDKYACWYQQKPGQSPVLVIYQDSMRPSGIPERFSGSNSGNTATLTISGTQAMDEADYYCQAWDSSTVVFGGGTKLTVL

SEQ ID NO: 1037 - protein, 106 aa, synthetic construct; identical to SEQ ID NO: 371

SEQ ID NO: 1038 - protein, 108 aa, synthetic construct; identical to SEQ ID NO: 415

SEQ ID NO: 1039 - protein, 108 aa, synthetic construct; identical to SEQ ID NO: 369

SEQ ID NO: 1040 - protein, 108 aa, synthetic construct
QSVLTQPPSASGTPGQRVTISCSGSSSNIGINTVNWYQQVPGTAPKLLIYFNNQRPSGVPDRFSGSKSGTSASLAISGLQSEDEADYYCAAWDDSLKVFGGGTKLTVL

SEQ ID NO: 1041 - protein, 109 aa, synthetic construct; identical to SEQ ID NO: 739

SEQ ID NO: 1042 - protein, 110 aa, synthetic construct; identical to SEQ ID NO: 991

SEQ ID NO: 1043 - protein, 106 aa, synthetic construct
SYELTQPSSVSVSPGQAARITCSGNLLAKKYPRWFLQKPGQAPIMLTHTDCERPSGIPERFSGSSSGTTVTLTISGAQVEDEADYYCFSAADNTSVFDGGTNLTVL

SEQ ID NO: 1044 - protein, 108 aa, synthetic construct; identical to SEQ ID NO: 344

SEQ ID NO: 1045 - protein, 108 aa, synthetic construct
SYELTQPPSVSVSPGQTARITCSGDALPKKYAYWFQQKSGQAPVLVIYEDSKRPSGIPERFSGSSSGTMATLIISGAQVEDEADYYCYSTDSSGNHVVFGGGTKLTVL

SEQ ID NO: 1046 - protein, 110 aa, synthetic construct; identical to SEQ ID NO: 341

SEQ ID NO: 1047 - protein, 110 aa, synthetic construct
QSVLNQPPSASGTPGQRVTISCSGSSSNIGSKTVNWYQQVPGTAPKLLIYSSNQRPSGVPDRFSGSKSGTSASLAISELQSEDEADYYCTSWDDSLNTWVFGGGTKLTVL

SEQ ID NO: 1048 - protein, 106 aa, synthetic construct
SYELTQPLSLSVALGQTARITCGENNIGSRNVHWYQQKPGQAPVLVIYRDSDRPSGIPERFSGSNSGNTATLTISRAQAGDEADYFCQVWDSSTAVFGGGTKLTVL

SEQ ID NO: 1049 - protein, 108 aa, synthetic construct; identical to SEQ ID NO: 344

SEQ ID NO: 1050 - protein, 108 aa, synthetic construct; identical to SEQ ID NO: 369

SEQ ID NO: 1051 - protein, 110 aa, synthetic construct
RSALTQPASVSGSPGQSITISCTGTSSDVGGYNYVSWYHQHPGKAPKLMIYDVSKRPSGVSNRFSGFKSGNTASLTISGLQAEDEADYFCCSYAGSSTLVFGGGTKLTVL

SEQ ID NO: 1052 - protein, 110 aa, synthetic construct
QSALTQPASVSGSPGQSITISCTGTSSDVGGYNHVSWYQQNPGKAPKLMIYDVSKRPSGVSNRFSGSKSGNTASLTISGLQAEDEADYYCCSYAGSSTLVFGGGTKLTVL

SEQ ID NO: 1053 - protein, 123 aa, synthetic construct
QVQLQESGPGLVKPSQTLSLTCTVSGGSISSGGYYWSWIRQHPGKGLEWIGNIYYSGNPYYNPSLKSRLIISVDTSKNQFSLRLNSVTAADTAVYYCATFYYGSGSYYNEDYWGQGTLVTVSS

SEQ ID NO: 1054 - protein, 117 aa, synthetic construct; identical to SEQ ID NO: 1

SEQ ID NO: 1055 - protein, 117 aa, synthetic construct
QVQLQESGPGLVKPSETLSLTCTVSGGSISSYDWSWIRQPPGKGLEWIGYIYYSGSTNYNPSLKSRVTISVDTSKNQFSLKLRSVTAADTAVYYCARKYSYGPFDNWGQGTLVTVSS

SEQ ID NO: 1056 - protein, 128 aa, synthetic construct
QVQLQESGPGLVKPSQTLSLTCDISGDSVSSNSAAWNWIRQSPSRGLEWLGRTYYRSKWYNDYAVAVKSRITINPDTSKNQFSLQLNSVTPEDTAVYYCARESSGWYEDYYYYYMDVWGKGTTVTVSS

SEQ ID NO: 1057 - protein, 119 aa, synthetic construct
QLQLQESGPGLVKPSETLSLTCTVSGGSISSSNHYWGWIRQPPGKGLEWIGTLYYSGSTYYEPSLKSRVTISVDTSMNQFSLNLSSVTATDTAVYNCARGDRYGPFDYWGQGTLVTVSS

SEQ ID NO: 1058 - protein, 127 aa, synthetic construct
EVQLVESGGGLVKPGGSLRLSCAASGFTFTNAWMNWVRQAPGKGLEWIGRIKSKTAGETTDYAAPVKGRFTISRDDSKNTLYLQMNSLKTEDTAVYYCTTDPDYGDPYYYYYFMDVWGKGTTVTVSS

SEQ ID NO: 1059 - protein, 118 aa, synthetic construct
QVQLVQSGVEVKKPGASVKVSCKASGYAFSNNDISWVRQAPGQGLEWMAWITTSNGNTNYAPKLQGRVTMTTDTSTSTAYMELRSLKSDDTAVYYCARGGRTGYFDYWGQGTLVTVSS

SEQ ID NO: 1060 - protein, 120 aa, synthetic construct
QVQLQESGPGLVKPSGTLSLTCAVSGGSITTNNWWSWVRQSPGKGLEWIGEIYHSGNTNYNPSLKSRVTMSVDKSKNQFSLNLNSVIVADTAVYYCASALGTYYGAFDTWGQGTMVTVSA

SEQ ID NO: 1061 - protein, 118 aa, synthetic construct
QVQLVESGGGVVQPGRSLRLSCAASGFTFSSYGMHWVRQAPGKGLEWVAFIWYDGRNKNYVDSVKGRFTISRDNSKNTLYLQMNSLRAEDTAVYYCARDRGDYVFDYWGQGTLVTVSS

SEQ ID NO: 1062 - protein, 121 aa, synthetic construct
QVQLVESGGGLVQPGRSLRLSCAASGFTFDDYAIHWVRQAPGKGLEWVSGISYNSENIGYADSVKGRFTISRDNAKNSLYLQMNSLRSEDTALYYCAKDMFLTWFSSFDYWGQGTLVTVSS

SEQ ID NO: 1063 - protein, 120 aa, synthetic construct
QVQLQESGPGLVKPSGTLSLTCAVSGGSISSSNWWSWVRQPPGKGLEWIGEIYHSGSINYNPSLKSRVTISVDKSKNQFSLKLTSVTAADTAVYYCASALGNYYGAFDLWGQGTMVTVSS

SEQ ID NO: 1064 - protein, 119 aa, synthetic construct
QLQLQESGPGLAKPSETLSLTCTVSGVSISSNSYYWGWIRQPPGKGLEWIGNIYHSGRTYYNPSLRSRVTISVDTSKNQFSLKLNSVTAADTAVYYCARGYSYGAFDYWGQGTLVTVSS

SEQ ID NO: 1065 - protein, 119 aa, synthetic construct
QLQLQESGPGLVKPSETLSLTCSVSGGSISSSGYYWGWIRQPPGKGLDWIGTIYYSGNTNYNPSLNSRVTISVDTSRNQFSLKLRSVTAADTAVYYCARGYSYGPFDYWGQGTLVTVSS

SEQ ID NO: 1066 - protein, 121 aa, synthetic construct
QVQLVESGAEVKKPRASVKVSCKTSGYTFTRHYMHWVRQAPGQGLEWMGIINPNNNSTSYAQKFQGRITMTRDTSTSTVYMELSSLRSEDTAVYYCARFRIVGTTLYFDYWGQGTLVTVSS

SEQ ID NO: 1067 - protein, 117 aa, synthetic construct; identical to SEQ ID NO: 1

SEQ ID NO: 1068 - protein, 125 aa, synthetic construct
QVQLVQSGAEVKKPGASVKVSCKASGYTFSSFGITWIRQAPGQGLEWMGWISGYTGNTNYAQNLQGRVTITTDTSTNTAYMELRSLKSDDTAVYYCAREPVLNPNYYYFYYMDVWGQGTTVTVSS

SEQ ID NO: 1069 - protein, 119 aa, synthetic construct
QVQLVQSGAEVKKPGASMKVSCKASGYTFTQNHISWVRQAPGQGLEWMGWISAYSGNTNYAWKFQGRVTMTTDTSTNTAYMELRSLRSDDTAVYYCARDRGNWNDFAYWGRGTLVTVSS

SEQ ID NO: 1070 - protein, 107 aa, synthetic construct
DIQMTQSPSSLSASVGDRVTITCRASQGIRIDLGWYQQKPGKAPKRLIYAASSLKSGVPSRFSGSGSGTEFTLTISSLQPEDFTTYFCLQHNSYPYTFGQGTKLEIK

SEQ ID NO: 1071 - protein, 107 aa, synthetic construct; identical to SEQ ID NO: 2

SEQ ID NO: 1072 - protein, 107 aa, synthetic construct
  VARIANT 94: note = Any amino acid
DIVMTQSPSSLSPSVGDRVTITCRASQGINNYLAWYQQKPGKVPQLLIYAASTLQSGVPSRFSGSGSGTDFTLTISSLQPEDVATYYCQKYNSXPFTFGPGTKVDIK

SEQ ID NO: 1073 - protein, 107 aa, synthetic construct
DIQMTQSPSSLSASVGDRVTITCRASQSISSYLNWYQQKPGKAPKLLIYAASSLQSGVPSRFSGSGSGTDFTLTISSLQPEDFATYYCQQSYSTPFTFGPGTKVDIK

SEQ ID NO: 1074 - protein, 107 aa, synthetic construct
DIVMTQSPSSLSASVGDRVTITCRASQGIRDDLGWYQQKPEKAPKRLICAASSLQSGVPSRFSGSGSGTEFTLTISSLQPEDFATYYCLQYNRYPWTFGQGTKVEIK

SEQ ID NO: 1075 - protein, 107 aa, synthetic construct
DIQMTQSPSSLSASIGDRVTISCRASQSISSYLNWYQQKPGKAPKLLIYGASSLQSGVPSRFSGSGSGTDFTLTISSLQPEDFATYYCQQSYSLPLTFGGGTKVEIK

SEQ ID NO: 1076 - protein, 112 aa, synthetic construct
DIVMTQSPLSLPVTPGEPASISCRSSQSLLHSNGYNYLDWYLQKPGQSPQLLIYLGSNRASGVPDRFSGSGSGTDSTLKISRVEAEDVGVYYCMQVLQIPLTFGGGTKVEIR

SEQ ID NO: 1077 - protein, 107 aa, synthetic construct
DIQMTQSPSSLSASVGDRVTITCRASQSISNYLNWYQQKPGKAPKLLIYAASSLQSGVPSRFSGSGSGTDFTLTISSLQPEDFTTYYCQQSYGTPYTFGQGAKLQIK

SEQ ID NO: 1078 - protein, 107 aa, synthetic construct
DIQMTQSPSSLSASVGDRVTITCQASQDIRNYLNWYQQKPGKAPKLLIYDASNLETGVPSRFSGSGSGTDFTFTISSLKPEDIATYYCQQYDNLLFTFGPGTKVDIK

SEQ ID NO: 1079 - protein, 108 aa, synthetic construct
ETKLTQSPGTLSLSPGERTTLSCRASQSISNNYLAWYQQKPGQAPRLLIYRASTRATGIPDRFSGSGSGTDFTLTIRRLEPEDFAVYYCQRYGRSPLTFGGGTKVEIK

SEQ ID NO: 1080 - protein, 107 aa, synthetic construct
DIVMTQSPSSLSASVGDRVTITCRASQTISSYLNWYQQKPGKAPKLLICAASSLQGGVPSRFSGSGSGTDFTLTISSLQPEDFAPYYCQQSYSTPYTFGQGTKLEIK

SEQ ID NO: 1081 - protein, 107 aa, synthetic construct
DIQMTQSPSSLSASVGDRVTITCRASQGIRNDLGWYQQKPGKAPKRLIYAASSLQSGIPSRFSGSGSGTEFTLTISSLQPEDFATYYCLQHNNYPWTFGQGTKVEIK

SEQ ID NO: 1082 - protein, 107 aa, synthetic construct
EIVMTQSPATLSVSPGERATLSCRASQSVSSNLAWYQLKPGQAPRLLIYGASTRATGIPARFSGSGSGTEFTLTISSLQSEDFAVYYCHPYNNWPLTFGGGTKVEIK

SEQ ID NO: 1083 - protein, 107 aa, synthetic construct; identical to SEQ ID NO: 1082

SEQ ID NO: 1084 - protein, 112 aa, synthetic construct; identical to SEQ ID NO: 1076

SEQ ID NO: 1085 - protein, 107 aa, synthetic construct
EIQLTQSPGTLSLSPGERATLSCRASQSVRNSYLAWYQQKPGQAPRLLTYGASSRATGIPDRFSGSGSGTDFTLTISRLEPEDCAVYFCQQYGSSPTFGGGTKVDIK

SEQ ID NO: 1086 - protein, 113 aa, synthetic construct
DIVMTQSPDSLAVSLGERATINCKSSQSVLYSSNNKNYLAWYQQKPGQPPKLLIYWASTRESGVPDRFSGSGSGTDFTLTISSLQAEDVAVYYCQQYYSTPYTFGQGTKLEIK

SEQ ID NO: 1087 - protein, 9 aa, synthetic construct
GDSVSSNSA

SEQ ID NO: 1088 - protein, 9 aa, synthetic construct
GDSVSSNSA

SEQ ID NO: 1089 - protein, 7 aa, synthetic construct
GFTFDDY

SEQ ID NO: 1090 - protein, 9 aa, synthetic construct
GGSISSSSY

SEQ ID NO: 1091 - protein, 7 aa, synthetic construct
GFTFSSY

SEQ ID NO: 1092 - protein, 7 aa, synthetic construct
GFTFNNY

SEQ ID NO: 1093 - protein, 7 aa, synthetic construct
GFTFSSY

SEQ ID NO: 1094 - protein, 7 aa, synthetic construct
GFTFSSY

SEQ ID NO: 1095 - protein, 7 aa, synthetic construct
GYTFTSY

SEQ ID NO: 1096 - protein, 7 aa, synthetic construct
GGSFSGY

SEQ ID NO: 1097 - protein, 7 aa, synthetic construct
GFTFSSY

SEQ ID NO: 1098 - protein, 7 aa, synthetic construct
GFSFSGS

SEQ ID NO: 1099 - protein, 7 aa, synthetic construct
GYTFTGY

SEQ ID NO: 1100 - protein, 7 aa, synthetic construct
GYTFINY

SEQ ID NO: 1101 - protein, 7 aa, synthetic construct
GFTFSSY

SEQ ID NO: 1102 - protein, 8 aa, synthetic construct
GGSISSSN

SEQ ID NO: 1103 - protein, 9 aa, synthetic construct
GFSLSTSGV

SEQ ID NO: 1104 - protein, 7 aa, synthetic construct
GFTFSSY

SEQ ID NO: 1105 - protein, 7 aa, synthetic construct
GFTFSNA

SEQ ID NO: 1106 - protein, 7 aa, synthetic construct
GFTFSSY

SEQ ID NO: 1107 - protein, 7 aa, synthetic construct
GFTFDDY

SEQ ID NO: 1108 - protein, 7 aa, synthetic construct
GYSFTSY

SEQ ID NO: 1109 - protein, 7 aa, synthetic construct
GYTFTSY

SEQ ID NO: 1110 - protein, 9 aa, synthetic construct
GDSVSSNSA

SEQ ID NO: 1111 - protein, 7 aa, synthetic construct
GGSFSGY

SEQ ID NO: 1112 - protein, 7 aa, synthetic construct
GFTFSSY

SEQ ID NO: 1113 - protein, 7 aa, synthetic construct
GFTFSNA

SEQ ID NO: 1114 - protein, 9 aa, synthetic construct
GGSISSGGY

SEQ ID NO: 1115 - protein, 9 aa, synthetic construct
GGSISSGGY

SEQ ID NO: 1116 - protein, 7 aa, synthetic construct
GFTFSNA

SEQ ID NO: 1117 - protein, 7 aa, synthetic construct
GYTFTSY

SEQ ID NO: 1118 - protein, 7 aa, synthetic construct
GYTFTTY

SEQ ID NO: 1119 - protein, 7 aa, synthetic construct
GFTFSSY

SEQ ID NO: 1120 - protein, 7 aa, synthetic construct
GFTFSNA

SEQ ID NO: 1121 - protein, 7 aa, synthetic construct
GYTFTSY

SEQ ID NO: 1122 - protein, 7 aa, synthetic construct
GFTFSNA

SEQ ID NO: 1123 - protein, 7 aa, synthetic construct
GFTFSSY

SEQ ID NO: 1124 - protein, 7 aa, synthetic construct
GYTFTSY

SEQ ID NO: 1125 - protein, 7 aa, synthetic construct
GFTFSNA

SEQ ID NO: 1126 - protein, 7 aa, synthetic construct
GFTFSSY

SEQ ID NO: 1127 - protein, 7 aa, synthetic construct
GFTFSSY

SEQ ID NO: 1128 - protein, 7 aa, synthetic construct
EFTFRNA

SEQ ID NO: 1129 - protein, 7 aa, synthetic construct
GFTFSNA

SEQ ID NO: 1130 - protein, 7 aa, synthetic construct
GFTFSNY

SEQ ID NO: 1131 - protein, 7 aa, synthetic construct
GFTFSDY

SEQ ID NO: 1132 - protein, 7 aa, synthetic construct
GYTFTNY

SEQ ID NO: 1133 - protein, 7 aa, synthetic construct
GYTFTSY

SEQ ID NO: 1134 - protein, 7 aa, synthetic construct
GFTFSSY

SEQ ID NO: 1135 - protein, 7 aa, synthetic construct
GFTFSNA

SEQ ID NO: 1136 - protein, 7 aa, synthetic construct
GFTFSNA

SEQ ID NO: 1137 - protein, 7 aa, synthetic construct
GFTFSSY

SEQ ID NO: 1138 - protein, 7 aa, synthetic construct
GFTFSSY

SEQ ID NO: 1139 - protein, 7 aa, synthetic construct
RYTFTSY

SEQ ID NO: 1140 - protein, 7 aa, synthetic construct
GFTFSSY

SEQ ID NO: 1141 - protein, 7 aa, synthetic construct
GLTVSTN

SEQ ID NO: 1142 - protein, 7 aa, synthetic construct
GFTFDDY

SEQ ID NO: 1143 - protein, 7 aa, synthetic construct
GFTVSSN

SEQ ID NO: 1144 - protein, 7 aa, synthetic construct
GFTFSSY

SEQ ID NO: 1145 - protein, 7 aa, synthetic construct
GFTFSSY

SEQ ID NO: 1146 - protein, 8 aa, synthetic construct
GGSISSNN

SEQ ID NO: 1147 - protein, 7 aa, synthetic construct
GYTFTRN

SEQ ID NO: 1148 - protein, 7 aa, synthetic construct
GFTFSSY

SEQ ID NO: 1149 - protein, 7 aa, synthetic construct
GYTFTSY

SEQ ID NO: 1150 - protein, 7 aa, synthetic construct
GFTFSSY

SEQ ID NO: 1151 - protein, 7 aa, synthetic construct
GFTFSSY

SEQ ID NO: 1152 - protein, 7 aa, synthetic construct
GYSFTSY

SEQ ID NO: 1153 - protein, 7 aa, synthetic construct
GFTFSNY

SEQ ID NO: 1154 - protein, 7 aa, synthetic construct
GFTFSSY

SEQ ID NO: 1155 - protein, 7 aa, synthetic construct
GYTFTSY

SEQ ID NO: 1156 - protein, 7 aa, synthetic construct
GFTFSSY

SEQ ID NO: 1157 - protein, 7 aa, synthetic construct
GFTVSSN

SEQ ID NO: 1158 - protein, 7 aa, synthetic construct
GFTFDDY

SEQ ID NO: 1159 - protein, 7 aa, synthetic construct
GFTFSDY

SEQ ID NO: 1160 - protein, 7 aa, synthetic construct
GFTVSRN

SEQ ID NO: 1161 - protein, 7 aa, synthetic construct
GFTFSSY

SEQ ID NO: 1162 - protein, 7 aa, synthetic construct
GFTFSSY

SEQ ID NO: 1163 - protein, 7 aa, synthetic construct
GFTFSRY

SEQ ID NO: 1164 - protein, 7 aa, synthetic construct
GFTFSSY

SEQ ID NO: 1165 - protein, 7 aa, synthetic construct
GFTFSIY

SEQ ID NO: 1166 - protein, 7 aa, synthetic construct
GYTFTSY

SEQ ID NO: 1167 - protein, 7 aa, synthetic construct
GYTFTSY

SEQ ID NO: 1168 - protein, 7 aa, synthetic construct
GYTFTSY

SEQ ID NO: 1169 - protein, 7 aa, synthetic construct
GFTFSSY

SEQ ID NO: 1170 - protein, 7 aa, synthetic construct
GFTFSNA

SEQ ID NO: 1171 - protein, 7 aa, synthetic construct
GFTFSSH

SEQ ID NO: 1172 - protein, 7 aa, synthetic construct
GFTFSSY

SEQ ID NO: 1173 - protein, 7 aa, synthetic construct
GGSFSGY

SEQ ID NO: 1174 - protein, 7 aa, synthetic construct
GYTFTSY

SEQ ID NO: 1175 - protein, 7 aa, synthetic construct
GFTFSDY

SEQ ID NO: 1176 - protein, 7 aa, synthetic construct
GYSFTSY

SEQ ID NO: 1177 - protein, 7 aa, synthetic construct
GFTFSSY

SEQ ID NO: 1178 - protein, 9 aa, synthetic construct
GGSISSGGY

SEQ ID NO: 1179 - protein, 9 aa, synthetic construct
GFSLSTSGV

SEQ ID NO: 1180 - protein, 7 aa, synthetic construct
GFTFSSY

SEQ ID NO: 1181 - protein, 9 aa, synthetic construct
GFSLSTSGV

SEQ ID NO: 1182 - protein, 7 aa, synthetic construct
GYPFTSY

SEQ ID NO: 1183 - protein, 7 aa, synthetic construct
GYSFTGY

SEQ ID NO: 1184 - protein, 7 aa, synthetic construct
GYTFSSY

SEQ ID NO: 1185 - protein, 7 aa, synthetic construct
GYTFTGY

SEQ ID NO: 1186 - protein, 7 aa, synthetic construct
GYTFTSY

SEQ ID NO: 1187 - protein, 7 aa, synthetic construct
GYTFTSY

SEQ ID NO: 1188 - protein, 7 aa, synthetic construct
GDTFSNF

SEQ ID NO: 1189 - protein, 7 aa, synthetic construct
GFTFSNA

SEQ ID NO: 1190 - protein, 9 aa, synthetic construct
GDSVSSNSA

SEQ ID NO: 1191 - protein, 7 aa, synthetic construct
GFTFNNA

SEQ ID NO: 1192 - protein, 7 aa, synthetic construct
GFTFSNA

SEQ ID NO: 1193 - protein, 7 aa, synthetic construct
GFTFSSY

SEQ ID NO: 1194 - protein, 7 aa, synthetic construct
GFTFDDY

SEQ ID NO: 1195 - protein, 9 aa, synthetic construct
GDSVSSNSA

SEQ ID NO: 1196 - protein, 7 aa, synthetic construct
GFTFDDY

SEQ ID NO: 1197 - protein, 7 aa, synthetic construct
GFTFSSY

SEQ ID NO: 1198 - protein, 7 aa, synthetic construct
GYTFTSY

SEQ ID NO: 1199 - protein, 7 aa, synthetic construct
GFNFSSY

SEQ ID NO: 1200 - protein, 7 aa, synthetic construct
GFTFSNA

SEQ ID NO: 1201 - protein, 7 aa, synthetic construct
GFTFSSY

SEQ ID NO: 1202 - protein, 7 aa, synthetic construct
GFTFSSY

SEQ ID NO: 1203 - protein, 8 aa, synthetic construct
GGSISSNN

SEQ ID NO: 1204 - protein, 8 aa, synthetic construct
GGSISSSN

SEQ ID NO: 1205 - protein, 8 aa, synthetic construct
GGSIISSN

SEQ ID NO: 1206 - protein, 7 aa, synthetic construct
GFTFSSY

SEQ ID NO: 1207 - protein, 7 aa, synthetic construct
GFTFSSY

SEQ ID NO: 1208 - protein, 9 aa, synthetic construct
GFSLNSSGV

SEQ ID NO: 1209 - protein, 7 aa, synthetic construct
GYIFMNY

SEQ ID NO: 1210 - protein, 7 aa, synthetic construct
GYTFTNY

SEQ ID NO: 1211 - protein, 7 aa, synthetic construct
GYTFTDN

SEQ ID NO: 1212 - protein, 7 aa, synthetic construct
GYTFTSY

SEQ ID NO: 1213 - protein, 7 aa, synthetic construct
GFTFSSY

SEQ ID NO: 1214 - protein, 7 aa, synthetic construct
GFTFSNY

SEQ ID NO: 1215 - protein, 7 aa, synthetic construct
GFTFSSY

SEQ ID NO: 1216 - protein, 7 aa, synthetic construct
GYRFSNY

SEQ ID NO: 1217 - protein, 7 aa, synthetic construct
GYTFTSY

SEQ ID NO: 1218 - protein, 7 aa, synthetic construct
GFTFSSY

SEQ ID NO: 1219 - protein, 7 aa, synthetic construct
GYTFTGY

SEQ ID NO: 1220 - protein, 9 aa, synthetic construct
GDSVSSNSA

SEQ ID NO: 1221 - protein, 7 aa, synthetic construct
GYTFTSY

SEQ ID NO: 1222 - protein, 9 aa, synthetic construct
GFSITTSGV

SEQ ID NO: 1223 - protein, 9 aa, synthetic construct
GFSLSTSGV

SEQ ID NO: 1224 - protein, 7 aa, synthetic construct
GYTFTSY

SEQ ID NO: 1225 - protein, 9 aa, synthetic construct
GFSLSTSGM

SEQ ID NO: 1226 - protein, 7 aa, synthetic construct
GYTFTSY

SEQ ID NO: 1227 - protein, 7 aa, synthetic construct
GDTFTNC

SEQ ID NO: 1228 - protein, 7 aa, synthetic construct
GFTFDDY

SEQ ID NO: 1229 - protein, 7 aa, synthetic construct
GFTFSSY

SEQ ID NO: 1230 - protein, 7 aa, synthetic construct
GFTFSSY

SEQ ID NO: 1231 - protein, 7 aa, synthetic construct
GFTFSSY

SEQ ID NO: 1232 - protein, 7 aa, synthetic construct
GYTFTGY

SEQ ID NO: 1233 - protein, 7 aa, synthetic construct
GFTFSSY

SEQ ID NO: 1234 - protein, 7 aa, synthetic construct
GFTFSDY

SEQ ID NO: 1235 - protein, 7 aa, synthetic construct
GYTFNSY

SEQ ID NO: 1236 - protein, 9 aa, synthetic construct
GGSISRSSY

SEQ ID NO: 1237 - protein, 8 aa, synthetic construct
GGSISSSF

SEQ ID NO: 1238 - protein, 7 aa, synthetic construct
GFTFSNA

SEQ ID NO: 1239 - protein, 7 aa, synthetic construct
GGSISSY

SEQ ID NO: 1240 - protein, 7 aa, synthetic construct
GFTFSSY

SEQ ID NO: 1241 - protein, 7 aa, synthetic construct
GFTFGDF

SEQ ID NO: 1242 - protein, 9 aa, synthetic construct
GDSVSSNSA

SEQ ID NO: 1243 - protein, 7 aa, synthetic construct
GFTFSSY

SEQ ID NO: 1244 - protein, 9 aa, synthetic construct
GDSVSSNSA

SEQ ID NO: 1245 - protein, 7 aa, synthetic construct
GYTFTTY

SEQ ID NO: 1246 - protein, 7 aa, synthetic construct
GFTFDDY

SEQ ID NO: 1247 - protein, 9 aa, synthetic construct
GDSVSSNSA

SEQ ID NO: 1248 - protein, 7 aa, synthetic construct
AFTFSNY

SEQ ID NO: 1249 - protein, 7 aa, synthetic construct
GFTFSSY

SEQ ID NO: 1250 - protein, 7 aa, synthetic construct
GFTFSNA

SEQ ID NO: 1251 - protein, 7 aa, synthetic construct
GFTFSSH

SEQ ID NO: 1252 - protein, 7 aa, synthetic construct
GFTFSSY

SEQ ID NO: 1253 - protein, 9 aa, synthetic construct
GGSISSSSY

SEQ ID NO: 1254 - protein, 7 aa, synthetic construct
GYSFSSY

SEQ ID NO: 1255 - protein, 7 aa, synthetic construct
GFTFSNA

SEQ ID NO: 1256 - protein, 7 aa, synthetic construct
GFTFSTY

SEQ ID NO: 1257 - protein, 7 aa, synthetic construct
GFTFSNA

SEQ ID NO: 1258 - protein, 9 aa, synthetic construct
GGSITTRSY

SEQ ID NO: 1259 - protein, 9 aa, synthetic construct
GDSVSSNSA

SEQ ID NO: 1260 - protein, 7 aa, synthetic construct
GFTFDDY

SEQ ID NO: 1261 - protein, 7 aa, synthetic construct
GYTFTGN

SEQ ID NO: 1262 - protein, 7 aa, synthetic construct
GYTFTDY

SEQ ID NO: 1263 - protein, 9 aa, synthetic construct
GGSISSRSY

SEQ ID NO: 1264 - protein, 7 aa, synthetic construct
GFTFSGS

SEQ ID NO: 1265 - protein, 7 aa, synthetic construct
GGSFSGY

SEQ ID NO: 1266 - protein, 7 aa, synthetic construct
GGSFSGY

SEQ ID NO: 1267 - protein, 9 aa, synthetic construct
GGSISSSSY

SEQ ID NO: 1268 - protein, 9 aa, synthetic construct
GGSISSSSY

SEQ ID NO: 1269 - protein, 7 aa, synthetic construct
GFTFRSY

SEQ ID NO: 1270 - protein, 9 aa, synthetic construct
GGSINSSNF

SEQ ID NO: 1271 - protein, 9 aa, synthetic construct
GGSISSSSY

SEQ ID NO: 1272 - protein, 7 aa, synthetic construct
GGSFSGY

SEQ ID NO: 1273 - protein, 9 aa, synthetic construct
GGSISSSGY

SEQ ID NO: 1274 - protein, 7 aa, synthetic construct
GGSFSGY

SEQ ID NO: 1275 - protein, 7 aa, synthetic construct
YYRSKWY

SEQ ID NO: 1276 - protein, 7 aa, synthetic construct
YYRSKWY

SEQ ID NO: 1277 - protein, 6 aa, synthetic construct
NWNGGS

SEQ ID NO: 1278 - protein, 5 aa, synthetic construct
YYSGS

SEQ ID NO: 1279 - protein, 6 aa, synthetic construct
SSSSSY

SEQ ID NO: 1280 - protein, 6 aa, synthetic construct
SSSSSY

SEQ ID NO: 1281 - protein, 6 aa, synthetic construct
WYDGSN

SEQ ID NO: 1282 - protein, 6 aa, synthetic construct
SGSGGS

SEQ ID NO: 1283 - protein, 6 aa, synthetic construct
SPYNGN

SEQ ID NO: 1284 - protein, 5 aa, synthetic construct
NHSGS

SEQ ID NO: 1285 - protein, 6 aa, synthetic construct
WYDGSN

SEQ ID NO: 1286 - protein, 8 aa, synthetic construct
RSKPNNYA

SEQ ID NO: 1287 - protein, 6 aa, synthetic construct
NPNSGG

SEQ ID NO: 1288 - protein, 6 aa, synthetic construct
SAYSGN

SEQ ID NO: 1289 - protein, 6 aa, synthetic construct
WYDGSN

SEQ ID NO: 1290 - protein, 5 aa, synthetic construct
YHSGS

SEQ ID NO: 1291 - protein, 5 aa, synthetic construct
YWNDD

SEQ ID NO: 1292 - protein, 6 aa, synthetic construct
SGSGGS

SEQ ID NO: 1293 - protein, 8 aa, synthetic construct
KSKTDGGT

SEQ ID NO: 1294 - protein, 6 aa, synthetic construct
SSSSST

SEQ ID NO: 1295 - protein, 6 aa, synthetic construct
NWNGGS

SEQ ID NO: 1296 - protein, 6 aa, synthetic construct
YPSDSD

SEQ ID NO: 1297 - protein, 6 aa, synthetic construct
SVYNGN

SEQ ID NO: 1298 - protein, 7 aa, synthetic construct
YYRSKWY

SEQ ID NO: 1299 - protein, 5 aa, synthetic construct
NHSGS

SEQ ID NO: 1300 - protein, 6 aa, synthetic construct
SSSSSY

SEQ ID NO: 1301 - protein, 8 aa, synthetic construct
KSKTDGGT

SEQ ID NO: 1302 - protein, 5 aa, synthetic construct
YYIGI

SEQ ID NO: 1303 - protein, 5 aa, synthetic construct
YYSGS

SEQ ID NO: 1304 - protein, 8 aa, synthetic construct
KSKTDGGT

SEQ ID NO: 1305 - protein, 6 aa, synthetic construct
NPNSGN

SEQ ID NO: 1306 - protein, 6 aa, synthetic construct
SAYNGN

SEQ ID NO: 1307 - protein, 6 aa, synthetic construct
SGSGGS

SEQ ID NO: 1308 - protein, 8 aa, synthetic construct
KSKSDGGT

SEQ ID NO: 1309 - protein, 6 aa, synthetic construct
NPNSGN

SEQ ID NO: 1310 - protein, 8 aa, synthetic construct
KSKTDGGT

SEQ ID NO: 1311 - protein, 6 aa, synthetic construct
SSSSSY

SEQ ID NO: 1312 - protein, 6 aa, synthetic construct
NPNSGN

SEQ ID NO: 1313 - protein, 8 aa, synthetic construct
KSKTDGGT

SEQ ID NO: 1314 - protein, 6 aa, synthetic construct
SSSSSY

SEQ ID NO: 1315 - protein, 5 aa, synthetic construct
GTAGD

SEQ ID NO: 1316 - protein, 8 aa, synthetic construct
RSEIDGGT

SEQ ID NO: 1317 - protein, 8 aa, synthetic construct
KSKTDGGT

SEQ ID NO: 1318 - protein, 6 aa, synthetic construct
WYDGSN

SEQ ID NO: 1319 - protein, 6 aa, synthetic construct
SSSGST

SEQ ID NO: 1320 - protein, 6 aa, synthetic construct
NTYNDK

SEQ ID NO: 1321 - protein, 6 aa, synthetic construct
SAYNGN

SEQ ID NO: 1322 - protein, 5 aa, synthetic construct
GTAGD

SEQ ID NO: 1323 - protein, 8 aa, synthetic construct
KSKTDGGT

SEQ ID NO: 1324 - protein, 8 aa, synthetic construct
KSKTDGGT

SEQ ID NO: 1325 - protein, 6 aa, synthetic construct
SSSSSY

SEQ ID NO: 1326 - protein, 6 aa, synthetic construct
KQDGSE

SEQ ID NO: 1327 - protein, 6 aa, synthetic construct
NPSGGT

SEQ ID NO: 1328 - protein, 6 aa, synthetic construct
SSSSST

SEQ ID NO: 1329 - protein, 5 aa, synthetic construct
YSGGG

SEQ ID NO: 1330 - protein, 6 aa, synthetic construct
NWNGGS

SEQ ID NO: 1331 - protein, 5 aa, synthetic construct
YSGGS

SEQ ID NO: 1332 - protein, 6 aa, synthetic construct
SSSSSY

SEQ ID NO: 1333 - protein, 6 aa, synthetic construct
NSDGSS

SEQ ID NO: 1334 - protein, 5 aa, synthetic construct
YHSGS

SEQ ID NO: 1335 - protein, 6 aa, synthetic construct
NTNIGN

SEQ ID NO: 1336 - protein, 6 aa, synthetic construct
SSSSSY

SEQ ID NO: 1337 - protein, 6 aa, synthetic construct
SAYNGN

SEQ ID NO: 1338 - protein, 5 aa, synthetic construct
GTAGD

SEQ ID NO: 1339 - protein, 6 aa, synthetic construct
WYDGSN

SEQ ID NO: 1340 - protein, 6 aa, synthetic construct
YPGDSD

SEQ ID NO: 1341 - protein, 6 aa, synthetic construct
KYDGRE

SEQ ID NO: 1342 - protein, 6 aa, synthetic construct
KQDGSE

SEQ ID NO: 1343 - protein, 6 aa, synthetic construct
SAYNGN

SEQ ID NO: 1344 - protein, 6 aa, synthetic construct
NSDGSS

SEQ ID NO: 1345 - protein, 5 aa, synthetic construct
YSGGS

SEQ ID NO: 1346 - protein, 6 aa, synthetic construct
SWNSGS

SEQ ID NO: 1347 - protein, 6 aa, synthetic construct
SSSGST

SEQ ID NO: 1348 - protein, 5 aa, synthetic construct
YAGGN

SEQ ID NO: 1349 - protein, 6 aa, synthetic construct
KQDGSE

SEQ ID NO: 1350 - protein, 6 aa, synthetic construct
KQDGSE

SEQ ID NO: 1351 - protein, 6 aa, synthetic construct
NIVGST

SEQ ID NO: 1352 - protein, 6 aa, synthetic construct
SSSSSY

SEQ ID NO: 1353 - protein, 6 aa, synthetic construct
KEDGSE

SEQ ID NO: 1354 - protein, 6 aa, synthetic construct
SAYNGN

SEQ ID NO: 1355 - protein, 6 aa, synthetic construct
NPNSGN

SEQ ID NO: 1356 - protein, 6 aa, synthetic construct
NPSGGS

SEQ ID NO: 1357 - protein, 5 aa, synthetic construct
GTAGD

SEQ ID NO: 1358 - protein, 8 aa, synthetic construct
KSKTDGGT

SEQ ID NO: 1359 - protein, 6 aa, synthetic construct
SSNGGN

SEQ ID NO: 1360 - protein, 6 aa, synthetic construct
SSSSSY

SEQ ID NO: 1361 - protein, 5 aa, synthetic construct
NHSGS

SEQ ID NO: 1362 - protein, 6 aa, synthetic construct
NPSGGS

SEQ ID NO: 1363 - protein, 6 aa, synthetic construct
SSSGST

SEQ ID NO: 1364 - protein, 6 aa, synthetic construct
YPGDSD

SEQ ID NO: 1365 - protein, 6 aa, synthetic construct
SSSSST

SEQ ID NO: 1366 - protein, 5 aa, synthetic construct
FYSGS

SEQ ID NO: 1367 - protein, 5 aa, synthetic construct
YWNDD

SEQ ID NO: 1368 - protein, 6 aa, synthetic construct
SYDGSN

SEQ ID NO: 1369 - protein, 5 aa, synthetic construct
YWSDD

SEQ ID NO: 1370 - protein, 6 aa, synthetic construct
SAYNSN

SEQ ID NO: 1371 - protein, 6 aa, synthetic construct
SAYNGN

SEQ ID NO: 1372 - protein, 6 aa, synthetic construct
NTNTGN

SEQ ID NO: 1373 - protein, 6 aa, synthetic construct
NPNSGG

SEQ ID NO: 1374 - protein, 6 aa, synthetic construct
NPNSGN

SEQ ID NO: 1375 - protein, 6 aa, synthetic construct
NPNSGN

SEQ ID NO: 1376 - protein, 6 aa, synthetic construct
IPIFAT

SEQ ID NO: 1377 - protein, 8 aa, synthetic construct
KRKTDGGT

SEQ ID NO: 1378 - protein, 7 aa, synthetic construct
YYRSKWY

SEQ ID NO: 1379 - protein, 8 aa, synthetic construct
KSKTDGGT

SEQ ID NO: 1380 - protein, 8 aa, synthetic construct
KSKTDGGT

SEQ ID NO: 1381 - protein, 6 aa, synthetic construct
SYDGSN

SEQ ID NO: 1382 - protein, 6 aa, synthetic construct
NWNGGS

SEQ ID NO: 1383 - protein, 7 aa, synthetic construct
YYRSKWY

SEQ ID NO: 1384 - protein, 6 aa, synthetic construct
SWNSGS

SEQ ID NO: 1385 - protein, 6 aa, synthetic construct
SSSSNT

SEQ ID NO: 1386 - protein, 6 aa, synthetic construct
NPSGGS

SEQ ID NO: 1387 - protein, 6 aa, synthetic construct
SNTGNT

SEQ ID NO: 1388 - protein, 8 aa, synthetic construct
KRKTDGGT

SEQ ID NO: 1389 - protein, 6 aa, synthetic construct
NSDGSS

SEQ ID NO: 1390 - protein, 6 aa, synthetic construct
SGSGGS

SEQ ID NO: 1391 - protein, 5 aa, synthetic construct
YHSGS

SEQ ID NO: 1392 - protein, 5 aa, synthetic construct
YHSGS

SEQ ID NO: 1393 - protein, 5 aa, synthetic construct
YHSGS

SEQ ID NO: 1394 - protein, 6 aa, synthetic construct
SSSSSY

SEQ ID NO: 1395 - protein, 6 aa, synthetic construct
KQDGSE

SEQ ID NO: 1396 - protein, 5 aa, synthetic construct
YWNGD

SEQ ID NO: 1397 - protein, 6 aa, synthetic construct
SAYNGN

SEQ ID NO: 1398 - protein, 6 aa, synthetic construct
NTNTGK

SEQ ID NO: 1399 - protein, 6 aa, synthetic construct
NPNSGG

SEQ ID NO: 1400 - protein, 6 aa, synthetic construct
NPSGGS

SEQ ID NO: 1401 - protein, 6 aa, synthetic construct
SSSSST

SEQ ID NO: 1402 - protein, 6 aa, synthetic construct
SGSGGR

SEQ ID NO: 1403 - protein, 6 aa, synthetic construct
SYDGSN

SEQ ID NO: 1404 - protein, 6 aa, synthetic construct
YPGDSD

SEQ ID NO: 1405 - protein, 6 aa, synthetic construct
NTNTGN

SEQ ID NO: 1406 - protein, 6 aa, synthetic construct
WYDGSN

SEQ ID NO: 1407 - protein, 6 aa, synthetic construct
NPNSGG

SEQ ID NO: 1408 - protein, 7 aa, synthetic construct
YYRSKWY

SEQ ID NO: 1409 - protein, 6 aa, synthetic construct
SAYNGN

SEQ ID NO: 1410 - protein, 5 aa, synthetic construct
YWNDD

SEQ ID NO: 1411 - protein, 5 aa, synthetic construct
YWNDD

SEQ ID NO: 1412 - protein, 6 aa, synthetic construct
NPNSGN

SEQ ID NO: 1413 - protein, 5 aa, synthetic construct
DWDDD

SEQ ID NO: 1414 - protein, 6 aa, synthetic construct
SGYKGN

SEQ ID NO: 1415 - protein, 6 aa, synthetic construct
SAYNGN

SEQ ID NO: 1416 - protein, 6 aa, synthetic construct
SKNSGS

SEQ ID NO: 1417 - protein, 6 aa, synthetic construct
SSSSST

SEQ ID NO: 1418 - protein, 6 aa, synthetic construct
SGSGGS

SEQ ID NO: 1419 - protein, 6 aa, synthetic construct
WYDGSN

SEQ ID NO: 1420 - protein, 6 aa, synthetic construct
NPNSGG

SEQ ID NO: 1421 - protein, 6 aa, synthetic construct
SSSSST

SEQ ID NO: 1422 - protein, 6 aa, synthetic construct
SSSGST

SEQ ID NO: 1423 - protein, 6 aa, synthetic construct
NTNTGN

SEQ ID NO: 1424 - protein, 5 aa, synthetic construct
YYSGS

SEQ ID NO: 1425 - protein, 5 aa, synthetic construct
YHSGS

SEQ ID NO: 1426 - protein, 8 aa, synthetic construct
KSKSDGET

SEQ ID NO: 1427 - protein, 5 aa, synthetic construct
YYSGS

SEQ ID NO: 1428 - protein, 6 aa, synthetic construct
SGSGGS

SEQ ID NO: 1429 - protein, 6 aa, synthetic construct
NWNGGS

SEQ ID NO: 1430 - protein, 7 aa, synthetic construct
YYRSKWY

SEQ ID NO: 1431 - protein, 6 aa, synthetic construct
SSSSST

SEQ ID NO: 1432 - protein, 7 aa, synthetic construct
YYMSKWY

SEQ ID NO: 1433 - protein, 6 aa, synthetic construct
SAYNGN

SEQ ID NO: 1434 - protein, 6 aa, synthetic construct
NWNGGS

SEQ ID NO: 1435 - protein, 7 aa, synthetic construct
YYRSKWY

SEQ ID NO: 1436 - protein, 6 aa, synthetic construct
SSSTSY

SEQ ID NO: 1437 - protein, 6 aa, synthetic construct
SSSSSY

SEQ ID NO: 1438 - protein, 8 aa, synthetic construct
KSKTDGGT

SEQ ID NO: 1439 - protein, 6 aa, synthetic construct
SGSESS

SEQ ID NO: 1440 - protein, 6 aa, synthetic construct
WYDGSN

SEQ ID NO: 1441 - protein, 5 aa, synthetic construct
HYSGS

SEQ ID NO: 1442 - protein, 6 aa, synthetic construct
SGYNGN

SEQ ID NO: 1443 - protein, 8 aa, synthetic construct
KSKTDGGT

SEQ ID NO: 1444 - protein, 6 aa, synthetic construct
SSGSST

SEQ ID NO: 1445 - protein, 8 aa, synthetic construct
KSKTDGGT

SEQ ID NO: 1446 - protein, 5 aa, synthetic construct
YYSGN

SEQ ID NO: 1447 - protein, 7 aa, synthetic construct
YYRSKWY

SEQ ID NO: 1448 - protein, 6 aa, synthetic construct
NWNGGS

SEQ ID NO: 1449 - protein, 6 aa, synthetic construct
NPTSGV

SEQ ID NO: 1450 - protein, 6 aa, synthetic construct
NPNSGG

SEQ ID NO: 1451 - protein, 5 aa, synthetic construct
FYSGS

SEQ ID NO: 1452 - protein, 8 aa, synthetic construct
RSKANSYA

SEQ ID NO: 1453 - protein, 5 aa, synthetic construct
NHSGS

SEQ ID NO: 1454 - protein, 5 aa, synthetic construct
NRSGS

SEQ ID NO: 1455 - protein, 5 aa, synthetic construct
YYSGS

SEQ ID NO: 1456 - protein, 5 aa, synthetic construct
YYSGS

SEQ ID NO: 1457 - protein, 6 aa, synthetic construct
NQDGSE

SEQ ID NO: 1458 - protein, 5 aa, synthetic construct
FYSGF

SEQ ID NO: 1459 - protein, 5 aa, synthetic construct
YYSGS

SEQ ID NO: 1460 - protein, 5 aa, synthetic construct
NRGGS

SEQ ID NO: 1461 - protein, 5 aa, synthetic construct
YYSGS

SEQ ID NO: 1462 - protein, 5 aa, synthetic construct
NHSGS

SEQ ID NO: 1463 - protein, 14 aa, synthetic construct
CARKGELLGAFDIW

SEQ ID NO: 1464 - protein, 14 aa, synthetic construct
CARKWELRDAFDIW

SEQ ID NO: 1465 - protein, 15 aa, synthetic construct
CAREDYGDPGWFDPW

SEQ ID NO: 1466 - protein, 11 aa, synthetic construct
CATLTGDGDYW

SEQ ID NO: 1467 - protein, 15 aa, synthetic construct
CARDRSSSWYSFDYW

SEQ ID NO: 1468 - protein, 16 aa, synthetic construct
CARDGITGTTFYFDYW

SEQ ID NO: 1469 - protein, 12 aa, synthetic construct
CASIAAAGRDYW

SEQ ID NO: 1470 - protein, 12 aa, synthetic construct
CAKAPELRFDYW

SEQ ID NO: 1471 - protein, 12 aa, synthetic construct
CARNHYYYMDVW

SEQ ID NO: 1472 - protein, 16 aa, synthetic construct
CARGELGIGYWYFDLW

SEQ ID NO: 1473 - protein, 17 aa, synthetic construct
CARDTGITMVRGVFDYW

SEQ ID NO: 1474 - protein, 15 aa, synthetic construct
CNGVYGGSSYFFDYW

SEQ ID NO: 1475 - protein, 12 aa, synthetic construct
CARDETTIFDYW

SEQ ID NO: 1476 - protein, 24 aa, synthetic construct
CARLGCNGTSCYTSWYYHFYMDVW

SEQ ID NO: 1477 - protein, 18 aa, synthetic construct
CARDEDYYGSGSYSFDYW

SEQ ID NO: 1478 - protein, 13 aa, synthetic construct
CARRGAARPFDYW

SEQ ID NO: 1479 - protein, 14 aa, synthetic construct
CAHSNWNYGYFDLW

SEQ ID NO: 1480 - protein, 14 aa, synthetic construct
CAKKDIVATHFDYW

SEQ ID NO: 1481 - protein, 17 aa, synthetic construct
CTTADYDFWSGYYMDVW

SEQ ID NO: 1482 - protein, 11 aa, synthetic construct [sequence omitted]

SEQ ID NO: 1483 - protein, 16 aa, synthetic construct
CARGGDTAMVTVFDYW

SEQ ID NO: 1484 - protein, 13 aa, synthetic construct
CARQINWGAIDYW

SEQ ID NO: 1485 - protein, 14 aa, synthetic construct
CARQITATRGFDYW

SEQ ID NO: 1486 - protein, 14 aa, synthetic construct
CARKWELRDTFDIW

SEQ ID NO: 1487 - protein, 11 aa, synthetic construct
CASYGDFFDYW

SEQ ID NO: 1488 - protein, 13 aa, synthetic construct
CARETELTVMDVW

SEQ ID NO: 1489 - protein, 22 aa, synthetic construct
CTTDWEYYDFWSGYYSPYFDYW

SEQ ID NO: 1490 - protein, 8 aa, synthetic construct [sequence omitted]

SEQ ID NO: 1491 - protein, 8 aa, synthetic construct
CVRAFDYW

SEQ ID NO: 1492 - protein, 7 aa, synthetic construct
CTTGANW

SEQ ID NO: 1493 - protein, 9 aa, synthetic construct [sequence omitted]

SEQ ID NO: 1494 - protein, 9 aa, synthetic construct
CARQIGDYW

SEQ ID NO: 1495 - protein, 9 aa, synthetic construct
CHQTGEDYW

SEQ ID NO: 1496 - protein, 8 aa, synthetic construct
CTTGGTHW

SEQ ID NO: 1497 - protein, 10 aa, synthetic construct
CARRSFLDYW

SEQ ID NO: 1498 - protein, 8 aa, synthetic construct
CTTGGTNW

SEQ ID NO: 1499 - protein, 11 aa, synthetic construct [sequence omitted]

SEQ ID NO: 1500 - protein, 11 aa, synthetic construct
CARGSSWFDYW

SEQ ID NO: 1501 - protein, 9 aa, synthetic construct
CTLNWGDYW

SEQ ID NO: 1502 - protein, 11 aa, synthetic construct
CARAADAFDIW

SEQ ID NO: 1503 - protein, 12 aa, synthetic construct [sequence omitted]

SEQ ID NO: 1504 - protein, 9 aa, synthetic construct
CTTDHPYYW

SEQ ID NO: 1505 - protein, 9 aa, synthetic construct
CTTDHPYYW

SEQ ID NO: 1506 - protein, 11 aa, synthetic construct
CALAVTGFDYW

SEQ ID NO: 1507 - protein, 11 aa, synthetic construct [sequence omitted]

SEQ ID NO: 1508 - protein, 12 aa, synthetic construct
CARDRGYSFDYW

SEQ ID NO: 1509 - protein, 12 aa, synthetic construct
CARNHYYYLDVW

SEQ ID NO: 1510 - protein, 13 aa, synthetic construct
CARVSPTGTTDYW

SEQ ID NO: 1511 - protein, 10 aa, synthetic construct
CTARPLGDVW

SEQ ID NO: 1512 - protein, 10 aa, synthetic construct
CTTDNGFDYW

SEQ ID NO: 1513 - protein, 12 aa, synthetic construct
CARDLISSFDYW

SEQ ID NO: 1514 - protein, 12 aa, synthetic construct
CARRIVGAFDYW

SEQ ID NO: 1515 - protein, 12 aa, synthetic construct
CARGGWGTMDVW

SEQ ID NO: 1516 - protein, 12 aa, synthetic construct [sequence omitted]

SEQ ID NO: 1517 - protein, 13 aa, synthetic construct
CARDNWDSYFDYW

SEQ ID NO: 1518 - protein, 12 aa, synthetic construct
CARTTVTHMDVW

SEQ ID NO: 1519 - protein, 13 aa, synthetic construct
CARDWNYDAFDIW

SEQ ID NO: 1520 - protein, 12 aa, synthetic construct
CARGDPGWFDPW

SEQ ID NO: 1521 - protein, 13 aa, synthetic construct
CARENWNYWFDPW

SEQ ID NO: 1522 - protein, 13 aa, synthetic construct
CARLRPGDSFDYW

SEQ ID NO: 1523 - protein, 13 aa, synthetic construct
CARSPNWGLFDYW

SEQ ID NO: 1524 - protein, 13 aa, synthetic construct
CARDRGATGFDYW

SEQ ID NO: 1525 - protein, 13 aa, synthetic construct
CARESGELLGDYW

SEQ ID NO: 1526 - protein, 14 aa, synthetic construct
CARYSGSYYYFDYW

SEQ ID NO: 1527 - protein, 13 aa, synthetic construct
CARGIAAAGKDYW

SEQ ID NO: 1528 - protein, 13 aa, synthetic construct
CARQDSNYVFDYW

SEQ ID NO: 1529 - protein, 13 aa, synthetic construct
CARDHSAWSFDYW

SEQ ID NO: 1530 - protein, 13 aa, synthetic construct
CARRRGSCSFDYW

SEQ ID NO: 1531 - protein, 13 aa, synthetic construct
CARRSYANCFDYW

SEQ ID NO: 1532 - protein, 13 aa, synthetic construct
CARDEQLVPFDIW

SEQ ID NO: 1533 - protein, 14 aa, synthetic construct
CARDGAAAGDFQHW

SEQ ID NO: 1534 - protein, 13 aa, synthetic construct [sequence omitted]

SEQ ID NO: 1535 - protein, 13 aa, synthetic construct
CARDGQLWSFDYW

SEQ ID NO: 1536 - protein, 14 aa, synthetic construct
CGRVVPIGNWFDPW

SEQ ID NO: 1537 - protein, 13 aa, synthetic construct
CARDSNWGVFDYW

SEQ ID NO: 1538 - protein, 13 aa, synthetic construct
CARDRLTGDLDYW

SEQ ID NO: 1539 - protein, 14 aa, synthetic construct
CAREGDRSDAFAIW

SEQ ID NO: 1540 - protein, 14 aa, synthetic construct
CARQQWLGYYFDYW

SEQ ID NO: 1541 - protein, 14 aa, synthetic construct
CARDSNFLYYFDYW

SEQ ID NO: 1542 - protein, 14 aa, synthetic construct
CARQITGTRGFDYW

SEQ ID NO: 1543 - protein, 14 aa, synthetic construct
CARMGYSNYPFDYW

SEQ ID NO: 1544 - protein, 14 aa, synthetic construct
CARGIPTTVTPDYW

SEQ ID NO: 1545 - protein, 15 aa, synthetic construct
CARAGLLTGDAFDIW

SEQ ID NO: 1546 - protein, 12 aa, synthetic construct
CITGTTFPFDYW

SEQ ID NO: 1547 - protein, 13 aa, synthetic construct
CTKGGVGASFDYW

SEQ ID NO: 1548 - protein, 14 aa, synthetic construct
CARGDYSNYYFDYW

SEQ ID NO: 1549 - protein, 8 aa, synthetic construct
CARWEQPW

SEQ ID NO: 1550 - protein, 14 aa, synthetic construct
CARRTGTTHYFDYW

SEQ ID NO: 1551 - protein, 14 aa, synthetic construct
CARGLWLGLYFDYW

SEQ ID NO: 1552 - protein, 14 aa, synthetic construct
CARFLGSSYYFDYW

SEQ ID NO: 1553 - protein, 14 aa, synthetic construct
CARGGAAAGAFDIW

SEQ ID NO: 1554 - protein, 14 aa, synthetic construct
CARAEWELLWFDPW

SEQ ID NO: 1555 - protein, 14 aa, synthetic construct
CAHNYFYISGYFYW

SEQ ID NO: 1556 - protein, 15 aa, synthetic construct
CAKDPLRVVNYMDVW

SEQ ID NO: 1557 - protein, 14 aa, synthetic construct
CAQTGYNSWSFDYW

SEQ ID NO: 1558 - protein, 15 aa, synthetic construct
CAREDAWNYGWFDPW

SEQ ID NO: 1559 - protein, 15 aa, synthetic construct
CAREILWLGGYFDYW

SEQ ID NO: 1560 - protein, 15 aa, synthetic construct [sequence omitted]

SEQ ID NO: 1561 - protein, 15 aa, synthetic construct
CARERIAVAPPFDYW

SEQ ID NO: 1562 - protein, 15 aa, synthetic construct
CARAGWELPEYFQHW

SEQ ID NO: 1563 - protein, 15 aa, synthetic construct
CARGGDDYSNLFDYW

SEQ ID NO: 1564 - protein, 15 aa, synthetic construct
CARTPLGIGRSFDLW

SEQ ID NO: 1565 - protein, 13 aa, synthetic construct
CTTASTVTTGDYW

SEQ ID NO: 1566 - protein, 11 aa, synthetic construct
CARERTEIDYW

SEQ ID NO: 1567 - protein, 13 aa, synthetic construct
CTTGRYFDWFDYW

SEQ ID NO: 1568 - protein, 13 aa, synthetic construct
CTTASGSYWFDPW

SEQ ID NO: 1569 - protein, 15 aa, synthetic construct
CAKGNWNYGDAFDIW

SEQ ID NO: 1570 - protein, 15 aa, synthetic construct
CARENYDFWSGFDPW

SEQ ID NO: 1571 - protein, 11 aa, synthetic construct
CAREDRGFDYW

SEQ ID NO: 1572 - protein, 15 aa, synthetic construct
CAKRAVVTDYYMDVW

SEQ ID NO: 1573 - protein, 15 aa, synthetic construct
CARTSSWSYDAFDIW

SEQ ID NO: 1574 - protein, 16 aa, synthetic construct
CARERGHTVTPYFDYW

SEQ ID NO: 1575 - protein, 16 aa, synthetic construct
CARDGPQVGATDFDYW

SEQ ID NO: 1576 - protein, 14 aa, synthetic construct
CTTEYSSSENFDYW

SEQ ID NO: 1577 - protein, 16 aa, synthetic construct
CARDLGAARPRGFDYW

SEQ ID NO: 1578 - protein, 16 aa, synthetic construct
CAKEGDSGYDSAFDIW

SEQ ID NO: 1579 - protein, 16 aa, synthetic construct
CARVLNWNYGDAFDIW

SEQ ID NO: 1580 - protein, 16 aa, synthetic construct
CARDPSIVGATAFDIW

SEQ ID NO: 1581 - protein, 16 aa, synthetic construct
CARSHIVGVNGGFDYW

SEQ ID NO: 1582 - protein, 16 aa, synthetic construct
CARDRYNWNYRAFDIW

SEQ ID NO: 1583 - protein, 16 aa, synthetic construct
CARDLGRGTISWFDPW

SEQ ID NO: 1584 - protein, 15 aa, synthetic construct
CTQTGYDSRWSFAYW

SEQ ID NO: 1585 - protein, 16 aa, synthetic construct
CAREGQWRGRGWFALW

SEQ ID NO: 1586 - protein, 16 aa, synthetic construct
CARERYFEDFHYMDVW

SEQ ID NO: 1587 - protein, 16 aa, synthetic construct
CARSSWLQLTYYFDYW

SEQ ID NO: 1588 - protein, 16 aa, synthetic construct
CAREGLQLGSNWFDPW

SEQ ID NO: 1589 - protein, 16 aa, synthetic construct
CARNDILTGEDAFDIW

SEQ ID NO: 1590 - protein, 16 aa, synthetic construct
CAKESIIVGATMFDYW

SEQ ID NO: 1591 - protein, 16 aa, synthetic construct
CAKGIAALGYYYMDVW

SEQ ID NO: 1592 - protein, 16 aa, synthetic construct
CAKRRITGSHNWFDPW

SEQ ID NO: 1593 - protein, 16 aa, synthetic construct
CARGGTIFGVVNFDYW

SEQ ID NO: 1594 - protein, 16 aa, synthetic construct
CLSRSGYSAHNDGDYW

SEQ ID NO: 1595 - protein, 16 aa, synthetic construct
CTKEGLVVRPDWFDPW

SEQ ID NO: 1596 - protein, 12 aa, synthetic construct
CARKGRDVFDIW

SEQ ID NO: 1597 - protein, 16 aa, synthetic construct [sequence omitted]

SEQ ID NO: 1598 - protein, 15 aa, synthetic construct
CTHTEYRNTWCVDYW

SEQ ID NO: 1599 - protein, 15 aa, synthetic construct
CAHSPYTSGWPFDYW

SEQ ID NO: 1600 - protein, 16 aa, synthetic construct
CARVSYSSSWSLFDYW

SEQ ID NO: 1601 - protein, 16 aa, synthetic construct
CARIRGVGALDGFDFW

SEQ ID NO: 1602 - protein, 17 aa, synthetic construct
CARPLDYGDYEGWFDPW

SEQ ID NO: 1603 - protein, 17 aa, synthetic construct
CAREGRTNYFYYYMDVW

SEQ ID NO: 1604 - protein, 17 aa, synthetic construct
CAKDITASGDYYYMDVW

SEQ ID NO: 1605 - protein, 17 aa, synthetic construct
CARDRVYNWNDGAFDIW

SEQ ID NO: 1606 - protein, 17 aa, synthetic construct
CAKDQRYNWNSWYFDLW

SEQ ID NO: 1607 - protein, 17 aa, synthetic construct
CARDHGGVTTYNWFDPW

SEQ ID NO: 1608 - protein, 17 aa, synthetic construct
CARDRMVRGVLDAFDIW

SEQ ID NO: 1609 - protein, 17 aa, synthetic construct
CVRGYSSGWYNWYFDLW

SEQ ID NO: 1610 - protein, 17 aa, synthetic construct
CARKVPGIAAAGAFDYW

SEQ ID NO: 1611 - protein, 17 aa, synthetic construct
CARGGYGYNFWIRFDPW

SEQ ID NO: 1612 - protein, 10 aa, synthetic construct
CASYWNFDYW

SEQ ID NO: 1613 - protein, 18 aa, synthetic construct
CARVLGYSYGYRRWFDPW

SEQ ID NO: 1614 - protein, 16 aa, synthetic construct
CTTEGSFNFYYFMDVW

SEQ ID NO: 1615 - protein, 19 aa, synthetic construct
CARDPFYYDFSDYYYMDVW

SEQ ID NO: 1616 - protein, 18 aa, synthetic construct
CAKNEARDYYGSGSFDYW

SEQ ID NO: 1617 - protein, 18 aa, synthetic construct
CASLVGATDYYFYYMDVW

SEQ ID NO: 1618 - protein, 14 aa, synthetic construct
CARKWELLDAFDIW

SEQ ID NO: 1619 - protein, 18 aa, synthetic construct
CAREERDDYSNYGYFQHW

SEQ ID NO: 1620 - protein, 14 aa, synthetic construct
CARGDWNYGVLDSW

SEQ ID NO: 1621 - protein, 18 aa, synthetic construct
CARSGYNWNYDYYFMDVW

SEQ ID NO: 1622 - protein, 19 aa, synthetic construct
CARDGCSSTSCYGNWFDPW

SEQ ID NO: 1623 - protein, 15 aa, synthetic construct
CARVDFGIVGAIDYW

SEQ ID NO: 1624 - protein, 19 aa, synthetic construct
CARDRDDFWSGYSPYFDYW

SEQ ID NO: 1625 - protein, 19 aa, synthetic construct
CAREKYDILTGYSPYFDYW

SEQ ID NO: 1626 - protein, 17 aa, synthetic construct
CTTDQVSGSYGDAFDIW

SEQ ID NO: 1627 - protein, 19 aa, synthetic construct
CAKRAGSGTYYRGYYFDYW

SEQ ID NO: 1628 - protein, 19 aa, synthetic construct
CAGTYYYDSSGYLNYMDVW

SEQ ID NO: 1629 - protein, 11 aa, synthetic construct
CASEGPYFDYW

SEQ ID NO: 1630 - protein, 19 aa, synthetic construct
CARAYCGGDCYYSNAFDAW

SEQ ID NO: 1631 - protein, 17 aa, synthetic construct
CTTDRVTIFGLARMDVW

SEQ ID NO: 1632 - protein, 20 aa, synthetic construct
CARDPTTIFGVVPYYYMDVW

SEQ ID NO: 1633 - protein, 18 aa, synthetic construct
CTTDRDYYGSGSYYFDYW

SEQ ID NO: 1634 - protein, 12 aa, synthetic construct
CAREDLIGNDYW

SEQ ID NO: 1635 - protein, 16 aa, synthetic construct
CSRDRLIVGASYFDLW

SEQ ID NO: 1636 - protein, 20 aa, synthetic construct
CAREKAPAHRSSWSWYFDLW

SEQ ID NO: 1637 - protein, 20 aa, synthetic construct
CTREGIAAANPGYFYYMDVW

SEQ ID NO: 1638 - protein, 21 aa, synthetic construct
CARCDMVRGVIDHYYNYMDVW

SEQ ID NO: 1639 - protein, 20 aa, synthetic construct
CVRQTYDSWTGYSFFYFDYW

SEQ ID NO: 1640 - protein, 20 aa, synthetic construct
CTRPMITFGGVIVYDAFDIW

SEQ ID NO: 1641 - protein, 16 aa, synthetic construct
CARGWGSSSWYYFDYW

SEQ ID NO: 1642 - protein, 16 aa, synthetic construct
CARGIFGVGGNWFDPW

SEQ ID NO: 1643 - protein, 14 aa, synthetic construct
CARYSSSWSGFDYW

SEQ ID NO: 1644 - protein, 14 aa, synthetic construct
CARGGSYYVYFDYW

SEQ ID NO: 1645 - protein, 23 aa, synthetic construct
CSRDTDCSSTSCYFNWNPFFDYW

SEQ ID NO: 1646 - protein, 16 aa, synthetic construct
CARGGYSYGLNWFDPW

SEQ ID NO: 1647 - protein, 19 aa, synthetic construct
CARTYYDFWSGYLNWFDPW

SEQ ID NO: 1648 - protein, 21 aa, synthetic construct
CARWRNYYDSSGSPYWYFDLW

SEQ ID NO: 1649 - protein, 19 aa, synthetic construct
CARQGRITMVRGVIPFDYW

SEQ ID NO: 1650 - protein, 24 aa, synthetic construct
CAGGYCSSTSCRYNWNYGGWFDPW

SEQ ID NO: 1651 - protein, 14 aa, synthetic construct
TGTSSDVGGYNYVS

SEQ ID NO: 1652 - protein, 14 aa, synthetic construct
TGTSSDVGGYNYVS

SEQ ID NO: 1653 - protein, 11 aa, synthetic construct
SGDKLGDKYAC

SEQ ID NO: 1654 - protein, 11 aa, synthetic construct
SGDVLAKKYAR

SEQ ID NO: 1655 - protein, 11 aa, synthetic construct
QGDSLRSYYAS

SEQ ID NO: 1656 - protein, 14 aa, synthetic construct
TGTSSDVGGYNYVS

SEQ ID NO: 1657 - protein, 14 aa, synthetic construct
TGTSSDVGGYNYVS

SEQ ID NO: 1658 - protein, 14 aa, synthetic construct
TGTSSDVGGYNYVS

SEQ ID NO: 1659 - protein, 14 aa, synthetic construct
TGTSSDVGGYNYVS

SEQ ID NO: 1660 - protein, 11 aa, synthetic construct
QGDSLRSYYAS

SEQ ID NO: 1661 - protein, 11 aa, synthetic construct
GGNNIGSKSVH

SEQ ID NO: 1662 - protein, 14 aa, synthetic construct
TLRSGINVGTYRIY

SEQ ID NO: 1663 - protein, 11 aa, synthetic construct
QGDSLRSYYAS

SEQ ID NO: 1664 - protein, 11 aa, synthetic construct
SGDALPKKYAY

SEQ ID NO: 1665 - protein, 14 aa, synthetic construct
TGTSSDVGGYNYVS

SEQ ID NO: 1666 - protein, 14 aa, synthetic construct
TLRSGINVGTYRIY

SEQ ID NO: 1667 - protein, 11 aa, synthetic construct
SGDKLGDKYAC

SEQ ID NO: 1668 - protein, 11 aa, synthetic construct
SGDALPKKYAY

SEQ ID NO: 1669 - protein, 11 aa, synthetic construct
QGDSLRSYYAS

SEQ ID NO: 1670 - protein, 14 aa, synthetic construct
TGTSSDVGGYNYVS

SEQ ID NO: 1671 - protein, 14 aa, synthetic construct
TGTSSDVGGYNYVS

SEQ ID NO: 1672 - protein, 14 aa, synthetic construct
TGTSSDVGGYNYVS

SEQ ID NO: 1673 - protein, 14 aa, synthetic construct
TGTSSDVGGYNYVS

SEQ ID NO: 1674 - protein, 14 aa, synthetic construct
TGTSSDVGGYNYVS

SEQ ID NO: 1675 - protein, 12 aa, synthetic construct
TLSSEHSTYTIE

SEQ ID NO: 1676 - protein, 12 aa, synthetic construct
TLSSEHSTYTIE

SEQ ID NO: 1677 - protein, 11 aa, synthetic construct
QGDSLRSYYAS

SEQ ID NO: 1678 - protein, 11 aa, synthetic construct
GGNNVGSKSVH

SEQ ID NO: 1679 - protein, 11 aa, synthetic construct
GGNTFGSKTVH

SEQ ID NO: 1680 - protein, 11 aa, synthetic construct
SGDALPKKYAY

SEQ ID NO: 1681 - protein, 14 aa, synthetic construct
TGTSSDVGGYNYVS

SEQ ID NO: 1682 - protein, 14 aa, synthetic construct
TGTSSDVGGYNYVS

SEQ ID NO: 1683 - protein, 13 aa, synthetic construct
SGSSSNIGSNTVN

SEQ ID NO: 1684 - protein, 11 aa, synthetic construct
SADALPKQYAY

SEQ ID NO: 1685 - protein, 11 aa, synthetic construct
SGDALPKKYAY

SEQ ID NO: 1686 - protein, 11 aa, synthetic construct
SADALPKQYAY

SEQ ID NO: 1687 - protein, 11 aa, synthetic construct
SGDKLGDKYAC

SEQ ID NO: 1688 - protein, 11 aa, synthetic construct
SGDKLGDKYAC

SEQ ID NO: 1689 - protein, 11 aa, synthetic construct
SGDKLGDKYAC

SEQ ID NO: 1690 - protein, 11 aa, synthetic construct
QGDSLRSYYAS

SEQ ID NO: 1691 - protein, 14 aa, synthetic construct
TGTSSDVGGYNYVS

SEQ ID NO: 1692 - protein, 11 aa, synthetic construct
QGDSLRSYYAS

SEQ ID NO: 1693 - protein, 11 aa, synthetic construct
QGDSLRSYYAS

SEQ ID NO: 1694 - protein, 13 aa, synthetic construct
SGSSSNIGNNAVN

SEQ ID NO: 1695 - protein, 14 aa, synthetic construct
TGTSSDVGGYNYVS

SEQ ID NO: 1696 - protein, 11 aa, synthetic construct
SGDKLGDKHAC

SEQ ID NO: 1697 - protein, 11 aa, synthetic construct
SGDVLAKKYAR

SEQ ID NO: 1698 - protein, 11 aa, synthetic construct
SGDVLAKKYAR

SEQ ID NO: 1699 - protein, 11 aa, synthetic construct
SGDVLAKKYAR

SEQ ID NO: 1700 - protein, 11 aa, synthetic construct
SGDVLAKKYAR

SEQ ID NO: 1701 - protein, 11 aa, synthetic construct
QGDRLRSYYAS

SEQ ID NO: 1702 - protein, 11 aa, synthetic construct
QGDSLRSYYAS

SEQ ID NO: 1703 - protein, 11 aa, synthetic construct
GGNNIGSKSVH

SEQ ID NO: 1704 - protein, 11 aa, synthetic construct
SGDALPKKYAY

SEQ ID NO: 1705 - protein, 14 aa, synthetic construct
ASSTGAVTSGYYPN

SEQ ID NO: 1706 - protein, 14 aa, synthetic construct
TGTSSDVGGYNYVS

SEQ ID NO: 1707 - protein, 14 aa, synthetic construct
TGTSSDVGGYNYVS

SEQ ID NO: 1708 - protein, 14 aa, synthetic construct
TGTSSDVGGYNYVS

SEQ ID NO: 1709 - protein, 11 aa, synthetic construct
SGDKLGDKYAC

SEQ ID NO: 1710 - protein, 11 aa, synthetic construct
SGDKLGDKYAC

SEQ ID NO: 1711 - protein, 11 aa, synthetic construct
SGDKLGDKYAC

SEQ ID NO: 1712 - protein, 11 aa, synthetic construct
QGDSLRSYYAS

SEQ ID NO: 1713 - protein, 11 aa, synthetic construct
SGDALPKKYAY

SEQ ID NO: 1714 - protein, 11 aa, synthetic construct
QGDSLRSYYAS

SEQ ID NO: 1715 - protein, 11 aa, synthetic construct
SGDALPKKYAY

SEQ ID NO: 1716 - protein, 11 aa, synthetic construct
GGNNIGSKSVH

SEQ ID NO: 1717 - protein, 13 aa, synthetic construct
SGSISNLGSNTVN

SEQ ID NO: 1718 - protein, 14 aa, synthetic construct
TGTSSDVGGYNYVS

SEQ ID NO: 1719 - protein, 14 aa, synthetic construct
TGTSSDVGGYNYVS

SEQ ID NO: 1720 - protein, 14 aa, synthetic construct
TGTSSDVGGYNYVS

SEQ ID NO: 1721 - protein, 14 aa, synthetic construct
TGTSSDVGGYNYVS

SEQ ID NO: 1722 - protein, 14 aa, synthetic construct
TGTSSDVGGYNYVS

SEQ ID NO: 1723 - protein, 14 aa, synthetic construct
TGSSSNIGAGYDVH

SEQ ID NO: 1724 - protein, 14 aa, synthetic construct
TGSSSNIGAGYDVH

SEQ ID NO: 1725 - protein, 14 aa, synthetic construct
TLRSGINVGTYRIY

SEQ ID NO: 1726 - protein, 14 aa, synthetic construct
TLRSGINVGTYRIY

SEQ ID NO: 1727 - protein, 11 aa, synthetic construct
RGNNIGSQNVH

SEQ ID NO: 1728 - protein, 11 aa, synthetic construct
SGDALPKKYAY

SEQ ID NO: 1729 - protein, 11 aa, synthetic construct
QGDSLRSFYAS

SEQ ID NO: 1730 - protein, 11 aa, synthetic construct
QGDSLRSYYAS

SEQ ID NO: 1731 - protein, 11 aa, synthetic construct
SGDALPKKYAY

SEQ ID NO: 1732 - protein, 11 aa, synthetic construct
QGDSLRSYYAS

SEQ ID NO: 1733 - protein, 11 aa, synthetic construct
SGDALPKKYAY

SEQ ID NO: 1734 - protein, 14 aa, synthetic construct
ASSTGAVTSGYYPN

SEQ ID NO: 1735 - protein, 14 aa, synthetic construct
TGTSSDVGGYNYVS

SEQ ID NO: 1736 - protein, 13 aa, synthetic construct
SGSSSNIGSNTVN

SEQ ID NO: 1737 - protein, 14 aa, synthetic construct
TGTSSDVGGYNYVS

SEQ ID NO: 1738 - protein, 14 aa, synthetic construct
TGTSSDVGGYNYVS

SEQ ID NO: 1739 - protein, 14 aa, synthetic construct
TGTSSDVGGYNYVS

SEQ ID NO: 1740 - protein, 14 aa, synthetic construct
TGTSSDVGGYNYVS

SEQ ID NO: 1741 - protein, 14 aa, synthetic construct
TLRSGINVGTYRIY

SEQ ID NO: 1742 - protein, 11 aa, synthetic construct
SGDKLGDKYAC

SEQ ID NO: 1743 - protein, 11 aa, synthetic construct
SADALPKQYAY

SEQ ID NO: 1744 - protein, 11 aa, synthetic construct
SGDKLGDKYAC

SEQ ID NO: 1745 - protein, 11 aa, synthetic construct
SADALPNQYAY

SEQ ID NO: 1746 - protein, 11 aa, synthetic construct
QGDSLRSYYAS

SEQ ID NO: 1747 - protein, 11 aa, synthetic construct
SGDALPKKYAY

SEQ ID NO: 1748 - protein, 11 aa, synthetic construct
QGDSLRSYYAS

SEQ ID NO: 1749 - protein, 11 aa, synthetic construct
SGDALPKKYAY

SEQ ID NO: 1750 - protein, 11 aa, synthetic construct
SGDALPKKYAY

SEQ ID NO: 1751 - protein, 11 aa, synthetic construct
SGDALPKKYAY

SEQ ID NO: 1752 - protein, 11 aa, synthetic construct
GGNNIGSKSVH

SEQ ID NO: 1753 - protein, 11 aa, synthetic construct
SADALPKQYAY

SEQ ID NO: 1754 - protein, 11 aa, synthetic construct
QGDSLRSYYAS

SEQ ID NO: 1755 - protein, 14 aa, synthetic construct
GSSTGAVTSGHYPY

SEQ ID NO: 1756 - protein, 14 aa, synthetic construct
TGTSSDVGGYNYVS

SEQ ID NO: 1757 - protein, 14 aa, synthetic construct
TGTSSDVGGYNYVS

SEQ ID NO: 1758 - protein, 14 aa, synthetic construct
TGTSSDVGGYNYVS

SEQ ID NO: 1759 - protein, 14 aa, synthetic construct
TGTSSDVGGYNYVS

SEQ ID NO: 1760 - protein, 14 aa, synthetic construct
TGTSSDVGGYNYVS

SEQ ID NO: 1761 - protein, 14 aa, synthetic construct
TGTSSDVGGYNYVS

SEQ ID NO: 1762 - protein, 11 aa, synthetic construct
SGDKLGDKYAC

SEQ ID NO: 1763 - protein, 11 aa, synthetic construct
SGDVLAKKYAR

SEQ ID NO: 1764 - protein, 11 aa, synthetic construct
SGDKLGDKYAC

SEQ ID NO: 1765 - protein, 11 aa, synthetic construct
SGDKLGDKYAC

SEQ ID NO: 1766 - protein, 11 aa, synthetic construct
SGDALPKKYAY

SEQ ID NO: 1767 - protein, 11 aa, synthetic construct
SGDALPKKYAY

SEQ ID NO: 1768 - protein, 14 aa, synthetic construct
TGTSSDVGGYNYVS

SEQ ID NO: 1769 - protein, 11 aa, synthetic construct
QGDSLRSYYAS

SEQ ID NO: 1770 - protein, 11 aa, synthetic construct
QGDSLRSYYAS

SEQ ID NO: 1771 - protein, 11 aa, synthetic construct
QGDSLRSYYAS

SEQ ID NO: 1772 - protein, 11 aa, synthetic construct
GGNNIGSKSVH

SEQ ID NO: 1773 - protein, 11 aa, synthetic construct
QGDSLRSYYAS

SEQ ID NO: 1774 - protein, 11 aa, synthetic construct
QGDSLRSYYAS

SEQ ID NO: 1775 - protein, 11 aa, synthetic construct
QGDSLRSYYAS

SEQ ID NO: 1776 - protein, 11 aa, synthetic construct
QGDSLRSYYAS

SEQ ID NO: 1777 - protein, 11 aa, synthetic construct
SGDALPKKYAY

SEQ ID NO: 1778 - protein, 11 aa, synthetic construct
QGDSFRNYYAS

SEQ ID NO: 1779 - protein, 11 aa, synthetic construct
QGDSLRSYYAS

SEQ ID NO: 1780 - protein, 11 aa, synthetic construct
QGDSLRSYYAS

SEQ ID NO: 1781 - protein, 14 aa, synthetic construct
ASSTGAVTSGYYPN

SEQ ID NO: 1782 - protein, 14 aa, synthetic construct
TGTSSDVGVYNFVS

SEQ ID NO: 1783 - protein, 14 aa, synthetic construct
TGSSSNIGAGYDVH

SEQ ID NO: 1784 - protein, 14 aa, synthetic construct
TGTSSDVGGYNYVS

SEQ ID NO: 1785 - protein, 14 aa, synthetic construct
TGSSSNIGAGYDVH

SEQ ID NO: 1786 - protein, 14 aa, synthetic construct
TLRSGIHVDTSRIY

SEQ ID NO: 1787 - protein, 14 aa, synthetic construct
TLRSGINVGSYRIY

SEQ ID NO: 1788 - protein, 14 aa, synthetic construct
TLRSGINVGTYRIY

SEQ ID NO: 1789 - protein, 11 aa, synthetic construct
QGDSLRSYYAS

SEQ ID NO: 1790 - protein, 11 aa, synthetic construct
QGDSLRSYYAS

SEQ ID NO: 1791 - protein, 11 aa, synthetic construct
QGDSLRSYYAS

SEQ ID NO: 1792 - protein, 11 aa, synthetic construct
QGDSLRSYYAS

SEQ ID NO: 1793 - protein, 11 aa, synthetic construct
QGDSLRSYYAS

SEQ ID NO: 1794 - protein, 11 aa, synthetic construct
QGDSLRSYYAS

SEQ ID NO: 1795 - protein, 11 aa, synthetic construct
SGDALPKKYAY

SEQ ID NO: 1796 - protein, 14 aa, synthetic construct
TGTSSDVGGYNYVS

SEQ ID NO: 1797 - protein, 14 aa, synthetic construct
TGTSSDVGGYNYVS

SEQ ID NO: 1798 - protein, 14 aa, synthetic construct
ASSTGAVTSGYYPN

SEQ ID NO: 1799 - protein, 14 aa, synthetic construct
TGSNSNIGAGYDIH

SEQ ID NO: 1800 - protein, 11 aa, synthetic construct
SGDVLAKKFAR

SEQ ID NO: 1801 - protein, 11 aa, synthetic construct
SGDALPKKYAY

SEQ ID NO: 1802 - protein, 11 aa, synthetic construct
GGNNFGSKSVH

SEQ ID NO: 1803 - protein, 14 aa, synthetic construct
TGTSSDVGAYNYVS

SEQ ID NO: 1804 - protein, 14 aa, synthetic construct
TGTSSDVGGYNYVS

SEQ ID NO: 1805 - protein, 14 aa, synthetic construct
TGTSSDVGGYNYVS

SEQ ID NO: 1806 - protein, 14 aa, synthetic construct
TGTSSDVGGYNYVS

SEQ ID NO: 1807 - protein, 14 aa, synthetic construct
TGSSSNIGAGYDVH

SEQ ID NO: 1808 - protein, 14 aa, synthetic construct
TGTSSDVGSYNRVS

SEQ ID NO: 1809 - protein, 14 aa, synthetic construct
TGSDSNIGAGYDVH

SEQ ID NO: 1810 - protein, 11 aa, synthetic construct
SGDKLGDKYAC

SEQ ID NO: 1811 - protein, 11 aa, synthetic construct
SGDGLSKKYAY

SEQ ID NO: 1812 - protein, 11 aa, synthetic construct
QGDSLRSYYAS

SEQ ID NO: 1813 - protein, 11 aa, synthetic construct
QGDSLRSYYAS

SEQ ID NO: 1814 - protein, 11 aa, synthetic construct
SGDALPKKYAY

SEQ ID NO: 1815 - protein, 11 aa, synthetic construct
QGDSLRSYYAS

SEQ ID NO: 1816 - protein, 11 aa, synthetic construct
QGDSLRSYYAS

SEQ ID NO: 1817 - protein, 11 aa, synthetic construct
QGDSLRSYYAS

SEQ ID NO: 1818 - protein, 14 aa, synthetic construct
TGTSSDVGGYNYVS

SEQ ID NO: 1819 - protein, 14 aa, synthetic construct
TGTSSDVGGYNYVS

SEQ ID NO: 1820 - protein, 11 aa, synthetic construct
QGDSLRSYYAT

SEQ ID NO: 1821 - protein, 11 aa, synthetic construct
GGNNIGSKSVH

SEQ ID NO: 1822 - protein, 11 aa, synthetic construct
QGDSLRSYYAS

SEQ ID NO: 1823 - protein, 11 aa, synthetic construct
QGDSLRSYYAS

SEQ ID NO: 1824 - protein, 14 aa, synthetic construct
TGTSSDVGGYNYVS

SEQ ID NO: 1825 - protein, 14 aa, synthetic construct
TGSSSNIGARYDVH

SEQ ID NO: 1826 - protein, 11 aa, synthetic construct
QGDSLRSYYAS

SEQ ID NO: 1827 - protein, 14 aa, synthetic construct
TGTSSDVGGYNYVS

SEQ ID NO: 1828 - protein, 11 aa, synthetic construct
SGDKLGDKYAC

SEQ ID NO: 1829 - protein, 11 aa, synthetic construct
SGDALPKKYAY

SEQ ID NO: 1830 - protein, 11 aa, synthetic construct
QGDSLRNYYAS

SEQ ID NO: 1831 - protein, 14 aa, synthetic construct
TGTSSDVGGYNYVS

SEQ ID NO: 1832 - protein, 11 aa, synthetic construct
QGDSLRTYYAS

SEQ ID NO: 1833 - protein, 11 aa, synthetic construct
GGDNIGIKNVH

SEQ ID NO: 1834 - protein, 11 aa, synthetic construct
SGDKLGDKYTC

SEQ ID NO: 1835 - protein, 11 aa, synthetic construct
QGDSLRSYYAS

SEQ ID NO: 1836 - protein, 14 aa, synthetic construct
TGTSSDVGGYNYVS

SEQ ID NO: 1837 - protein, 14 aa, synthetic construct
TGTSSDVGGYNYVS

SEQ ID NO: 1838 - protein, 14 aa, synthetic construct
GSSTGAVTSGHYPY

SEQ ID NO: 1839 - protein, 7 aa, synthetic construct
EVSNRPS

SEQ ID NO: 1840 - protein, 7 aa, synthetic construct
DVSKRPS

SEQ ID NO: 1841 - protein, 7 aa, synthetic construct
QDSKRPS

SEQ ID NO: 1842 - protein, 7 aa, synthetic construct
KDSERPS

SEQ ID NO: 1843 - protein, 7 aa, synthetic construct
GKNNRPS

SEQ ID NO: 1844 - protein, 7 aa, synthetic construct
DVSKRPS

SEQ ID NO: 1845 - protein, 7 aa, synthetic construct
EVSKRPS

SEQ ID NO: 1846 - protein, 7 aa, synthetic construct
EVSNRPS

SEQ ID NO: 1847 - protein, 7 aa, synthetic construct
DVSKRPS

SEQ ID NO: 1848 - protein, 7 aa, synthetic construct
GKNNRPS

SEQ ID NO: 1849 - protein, 7 aa, synthetic construct
YDSDRPS

SEQ ID NO: 1850 - protein, 11 aa, synthetic construct
YKSDSDKQQGS

SEQ ID NO: 1851 - protein, 7 aa, synthetic construct
GKNNRPS

SEQ ID NO: 1852 - protein, 7 aa, synthetic construct
EDSKRPS

SEQ ID NO: 1853 - protein, 7 aa, synthetic construct
EVSNRPS

SEQ ID NO: 1854 - protein, 11 aa, synthetic construct
YKSDSDKQQGS

SEQ ID NO: 1855 - protein, 7 aa, synthetic construct
QDSKRPS

SEQ ID NO: 1856 - protein, 7 aa, synthetic construct
EDSKRPS

SEQ ID NO: 1857 - protein, 7 aa, synthetic construct
GKNNRPS

SEQ ID NO: 1858 - protein, 7 aa, synthetic construct
DVSKRPS

SEQ ID NO: 1859 - protein, 7 aa, synthetic construct
EVSNRPS

SEQ ID NO: 1860 - protein, 7 aa, synthetic construct
DVSKRPS

SEQ ID NO: 1861 - protein, 7 aa, synthetic construct
DVSKRPS

SEQ ID NO: 1862 - protein, 7 aa, synthetic construct
DVSKRPS

SEQ ID NO: 1863 - protein, 11 aa, synthetic construct
VKSDGSHSKGD

SEQ ID NO: 1864 - protein, 11 aa, synthetic construct
VKSDGSHSKGD

SEQ ID NO: 1865 - protein, 7 aa, synthetic construct
GKNNRPS

SEQ ID NO: 1866 - protein, 7 aa, synthetic construct
YDTDRPS

SEQ ID NO: 1867 - protein, 7 aa, synthetic construct
YDSDRPS

SEQ ID NO: 1868 - protein, 7 aa, synthetic construct
EDSKRPS

SEQ ID NO: 1869 - protein, 7 aa, synthetic construct
EVSNRPS

SEQ ID NO: 1870 - protein, 7 aa, synthetic construct
EVIKRPS

SEQ ID NO: 1871 - protein, 7 aa, synthetic construct
SNNQRPS

SEQ ID NO: 1872 - protein, 7 aa, synthetic construct
KDSERPS

SEQ ID NO: 1873 - protein, 7 aa, synthetic construct
EDSKRPS

SEQ ID NO: 1874 - protein, 7 aa, synthetic construct
KDSERPS

SEQ ID NO: 1875 - protein, 7 aa, synthetic construct
QDSKRPS

SEQ ID NO: 1876 - protein, 7 aa, synthetic construct
QDSKRPS

SEQ ID NO: 1877 - protein, 7 aa, synthetic construct
QDSKRPS

SEQ ID NO: 1878 - protein, 7 aa, synthetic construct
GKNNRPS

SEQ ID NO: 1879 - protein, 7 aa, synthetic construct
DVSKRPS

SEQ ID NO: 1880 - protein, 7 aa, synthetic construct
GKNNRPS

SEQ ID NO: 1881 - protein, 7 aa, synthetic construct
GKNNRPS

SEQ ID NO: 1882 - protein, 7 aa, synthetic construct
YDDLLPS

SEQ ID NO: 1883 - protein, 7 aa, synthetic construct
DVSKRPS

SEQ ID NO: 1884 - protein, 7 aa, synthetic construct
QDSKRPS

SEQ ID NO: 1885 - protein, 7 aa, synthetic construct
KDSERPS

SEQ ID NO: 1886 - protein, 7 aa, synthetic construct
KDSERPS

SEQ ID NO: 1887 - protein, 7 aa, synthetic construct
KDSERPS

SEQ ID NO: 1888 - protein, 7 aa, synthetic construct
KDSERPS

SEQ ID NO: 1889 - protein, 7 aa, synthetic construct
GKNNRPS

SEQ ID NO: 1890 - protein, 7 aa, synthetic construct
GKNNRPS

SEQ ID NO: 1891 - protein, 7 aa, synthetic construct
YDSDRPS

SEQ ID NO: 1892 - protein, 7 aa, synthetic construct
EDSKRPS

SEQ ID NO: 1893 - protein, 7 aa, synthetic construct
STSNKHS

SEQ ID NO: 1894 - protein, 7 aa, synthetic construct
EVSKRPS

SEQ ID NO: 1895 - protein, 7 aa, synthetic construct
DVSKRPS

SEQ ID NO: 1896 - protein, 7 aa, synthetic construct
DVSKRPS

SEQ ID NO: 1897 - protein, 7 aa, synthetic construct
QDSKRPS

SEQ ID NO: 1898 - protein, 7 aa, synthetic construct
QDNKRPS

SEQ ID NO: 1899 - protein, 7 aa, synthetic construct
QDSKRPS

SEQ ID NO: 1900 - protein, 7 aa, synthetic construct
GKNNRPS

SEQ ID NO: 1901 - protein, 7 aa, synthetic construct
EDSKRPS

SEQ ID NO: 1902 - protein, 7 aa, synthetic construct
GKNNRPS

SEQ ID NO: 1903 - protein, 7 aa, synthetic construct
EDSKRPS

SEQ ID NO: 1904 - protein, 7 aa, synthetic construct
YDSDRPS

SEQ ID NO: 1905 - protein, 7 aa, synthetic construct
SNNQRPS

SEQ ID NO: 1906 - protein, 7 aa, synthetic construct
EVSKRPS

SEQ ID NO: 1907 - protein, 7 aa, synthetic construct
EVSKRPS

SEQ ID NO: 1908 - protein, 7 aa, synthetic construct
DVSKRPS

SEQ ID NO: 1909 - protein, 7 aa, synthetic construct
DVSKRPS

SEQ ID NO: 1910 - protein, 7 aa, synthetic construct
EVSKRPS

SEQ ID NO: 1911 - protein, 7 aa, synthetic construct
GNSNRPS

SEQ ID NO: 1912 - protein, 7 aa, synthetic construct
GNNNRPS

SEQ ID NO: 1913 - protein, 11 aa, synthetic construct
YKSDSDKQQGS

SEQ ID NO: 1914 - protein, 11 aa, synthetic construct
YKSDSDKQQGS

SEQ ID NO: 1915 - protein, 7 aa, synthetic construct
RNINRPS

SEQ ID NO: 1916 - protein, 7 aa, synthetic construct
EDSKRPS

SEQ ID NO: 1917 - protein, 7 aa, synthetic construct
GKSNRPS

SEQ ID NO: 1918 - protein, 7 aa, synthetic construct
GKNNRPS

SEQ ID NO: 1919 - protein, 7 aa, synthetic construct
EDSKRPS

SEQ ID NO: 1920 - protein, 7 aa, synthetic construct
GKNNRPS

SEQ ID NO: 1921 - protein, 7 aa, synthetic construct
EDSKRPS

SEQ ID NO: 1922 - protein, 7 aa, synthetic construct
STSNKHS

SEQ ID NO: 1923 - protein, 7 aa, synthetic construct
EVSNRPS

SEQ ID NO: 1924 - protein, 7 aa, synthetic construct
SNNQRPS

SEQ ID NO: 1925 - protein, 7 aa, synthetic construct
EVSKRPS

SEQ ID NO: 1926 - protein, 7 aa, synthetic construct
DVSKRPS

SEQ ID NO: 1927 - protein, 7 aa, synthetic construct
DVSKRPS

SEQ ID NO: 1928 - protein, 7 aa, synthetic construct
EVSKRPS

SEQ ID NO: 1929 - protein, 11 aa, synthetic construct
YKSDSDKQQGS

SEQ ID NO: 1930 - protein, 7 aa, synthetic construct
QDSKRPS

SEQ ID NO: 1931 - protein, 7 aa, synthetic construct
KDSERPS

SEQ ID NO: 1932 - protein, 7 aa, synthetic construct
QDTKRPS

SEQ ID NO: 1933 - protein, 7 aa, synthetic construct
KDSERPS

SEQ ID NO: 1934 - protein, 7 aa, synthetic construct
GKNNRPS

SEQ ID NO: 1935 - protein, 7 aa, synthetic construct
EDSKRPS

SEQ ID NO: 1936 - protein, 7 aa, synthetic construct
GKNNRPS

SEQ ID NO: 1937 - protein, 7 aa, synthetic construct
EDSKRPS

SEQ ID NO: 1938 - protein, 7 aa, synthetic construct
EDSKRPS

SEQ ID NO: 1939 - protein, 7 aa, synthetic construct
EDSKRPS

SEQ ID NO: 1940 - protein, 7 aa, synthetic construct
YDSDRPS

SEQ ID NO: 1941 - protein, 7 aa, synthetic construct
KDSERPS

SEQ ID NO: 1942 - protein, 7 aa, synthetic construct
GKNNRPS

SEQ ID NO: 1943 - protein, 7 aa, synthetic construct
DTSNKHS

SEQ ID NO: 1944 - protein, 7 aa, synthetic construct
EVSKRPS

SEQ ID NO: 1945 - protein, 7 aa, synthetic construct
DVSKRPS

SEQ ID NO: 1946 - protein, 7 aa, synthetic construct
EVSNRPS

SEQ ID NO: 1947 - protein, 7 aa, synthetic construct
DVSKRPS

SEQ ID NO: 1948 - protein, 7 aa, synthetic construct
DVSKRPS

SEQ ID NO: 1949 - protein, 7 aa, synthetic construct
EVSKRPS

SEQ ID NO: 1950 - protein, 7 aa, synthetic construct
QDSKRPS

SEQ ID NO: 1951 - protein, 7 aa, synthetic construct
KDSERPS

SEQ ID NO: 1952 - protein, 7 aa, synthetic construct
QDSKRPS

SEQ ID NO: 1953 - protein, 7 aa, synthetic construct
QDSKRPS

SEQ ID NO: 1954 - protein, 7 aa, synthetic construct
EDSKRPS

SEQ ID NO: 1955 - protein, 7 aa, synthetic construct
EDSKRPS

SEQ ID NO: 1956 - protein, 7 aa, synthetic construct
DVSKRPS

SEQ ID NO: 1957 - protein, 7 aa, synthetic construct
GKNNRPS

SEQ ID NO: 1958 - protein, 7 aa, synthetic construct
GKNNRPS

SEQ ID NO: 1959 - protein, 7 aa, synthetic construct
GKNNRPS

SEQ ID NO: 1960 - protein, 7 aa, synthetic construct
YDSDRPS

SEQ ID NO: 1961 - protein, 7 aa, synthetic construct
GKNNRPS

SEQ ID NO: 1962 - protein, 7 aa, synthetic construct
GKNNRPS

SEQ ID NO: 1963 - protein, 7 aa, synthetic construct
GKNNRPS

SEQ ID NO: 1964 - protein, 7 aa, synthetic construct
GKKNRPS

SEQ ID NO: 1965 - protein, 7 aa, synthetic construct
EDSKRPS

SEQ ID NO: 1966 - protein, 7 aa, synthetic construct
GKNNRPS

SEQ ID NO: 1967 - protein, 7 aa, synthetic construct
GKNNRPS

SEQ ID NO: 1968 - protein, 7 aa, synthetic construct
GKNNRPS

SEQ ID NO: 1969 - protein, 7 aa, synthetic construct
STSNKHS

SEQ ID NO: 1970 - protein, 7 aa, synthetic construct
DVTKRPS

SEQ ID NO: 1971 - protein, 7 aa, synthetic construct
VNNNRPS

SEQ ID NO: 1972 - protein, 7 aa, synthetic construct
DVSKRPS

SEQ ID NO: 1973 - protein, 7 aa, synthetic construct
GNSNRPS

SEQ ID NO: 1974 - protein, 11 aa, synthetic construct
YKSDSDKHQDS

SEQ ID NO: 1975 - protein, 11 aa, synthetic construct
YKSDSDKQQGS

SEQ ID NO: 1976 - protein, 11 aa, synthetic construct
YKSDSDKQQGS

SEQ ID NO: 1977 - protein, 7 aa, synthetic construct
GKNNRPS

SEQ ID NO: 1978 - protein, 7 aa, synthetic construct
GKNNRPS

SEQ ID NO: 1979 - protein, 7 aa, synthetic construct
GKNNRPS

SEQ ID NO: 1980 - protein, 7 aa, synthetic construct
GKNNRPS

SEQ ID NO: 1981 - protein, 7 aa, synthetic construct
HKNNRPS

SEQ ID NO: 1982 - protein, 7 aa, synthetic construct
GKNNRPS

SEQ ID NO: 1983 - protein, 7 aa, synthetic construct
EDSKRPS

SEQ ID NO: 1984 - protein, 7 aa, synthetic construct
EVSKRPS

SEQ ID NO: 1985 - protein, 7 aa, synthetic construct
EVSKRPS

SEQ ID NO: 1986 - protein, 7 aa, synthetic construct
STSNKHS

SEQ ID NO: 1987 - protein, 7 aa, synthetic construct
GNSNRPS

SEQ ID NO: 1988 - protein, 7 aa, synthetic construct
KDSERPS

SEQ ID NO: 1989 - protein, 7 aa, synthetic construct
EDSKRPS

SEQ ID NO: 1990 - protein, 7 aa, synthetic construct
YDSDRPS

SEQ ID NO: 1991 - protein, 7 aa, synthetic construct
AVSKRPS

SEQ ID NO: 1992 - protein, 7 aa, synthetic construct
DVSKRPS

SEQ ID NO: 1993 - protein, 7 aa, synthetic construct
EVNKRPS

SEQ ID NO: 1994 - protein, 7 aa, synthetic construct
DVSKRPS

SEQ ID NO: 1995 - protein, 7 aa, synthetic construct
GNSNRPS

SEQ ID NO: 1996 - protein, 7 aa, synthetic construct
DVSNRPS

SEQ ID NO: 1997 - protein, 7 aa, synthetic construct
DNIIRPS

SEQ ID NO: 1998 - protein, 7 aa, synthetic construct
QDSKRPS

SEQ ID NO: 1999 - protein, 7 aa, synthetic construct
EDSKRPS

SEQ ID NO: 2000 - protein, 7 aa, synthetic construct
GKNNRPS

SEQ ID NO: 2001 - protein, 7 aa, synthetic construct
GKNNRPS

SEQ ID NO: 2002 - protein, 7 aa, synthetic construct
EDSKRPS

SEQ ID NO: 2003 - protein, 7 aa, synthetic construct
GKNNRPS

SEQ ID NO: 2004 - protein, 7 aa, synthetic construct
GKNNRPS

SEQ ID NO: 2005 - protein, 7 aa, synthetic construct
GKNNRPS

SEQ ID NO: 2006 - protein, 7 aa, synthetic construct
EVSNRPS

SEQ ID NO: 2007 - protein, 7 aa, synthetic construct
DVSKRPS

SEQ ID NO: 2008 - protein, 7 aa, synthetic construct
GRNNRPS

SEQ ID NO: 2009 - protein, 7 aa, synthetic construct
YDSDRPS

SEQ ID NO: 2010 - protein, 7 aa, synthetic construct
GKNNRPS

SEQ ID NO: 2011 - protein, 7 aa, synthetic construct
GKNKRPS

SEQ ID NO: 2012 - protein, 7 aa, synthetic construct
DVSKRPS

SEQ ID NO: 2013 - protein, 7 aa, synthetic construct
GNSNRPS

SEQ ID NO: 2014 - protein, 7 aa, synthetic construct
GKNNRPS

SEQ ID NO: 2015 - protein, 7 aa, synthetic construct
DVSKRPS

SEQ ID NO: 2016 - protein, 7 aa, synthetic construct
QDSKRPS

SEQ ID NO: 2017 - protein, 7 aa, synthetic construct
EDNKRPS

SEQ ID NO: 2018 - protein, 7 aa, synthetic construct
GKNNRPS

SEQ ID NO: 2019 - protein, 7 aa, synthetic construct
EVSKRPS

SEQ ID NO: 2020 - protein, 7 aa, synthetic construct
GKNKRPS

SEQ ID NO: 2021 - protein, 7 aa, synthetic construct
DDSDRPS

SEQ ID NO: 2022 - protein, 7 aa, synthetic construct
QDIKRPS

SEQ ID NO: 2023 - protein, 7 aa, synthetic construct
GKNNRPS

SEQ ID NO: 2024 - protein, 7 aa, synthetic construct
EVSKRPS

SEQ ID NO: 2025 - protein, 7 aa, synthetic construct
EVSNRPS

SEQ ID NO: 2026 - protein, 7 aa, synthetic construct
DTSNKHS

SEQ ID NO: 2027 - protein, 12 aa, synthetic construct [sequence omitted]

SEQ ID NO: 2028 - protein, 16 aa, synthetic construct
CCSYAGRSTLGIDWVF

SEQ ID NO: 2029 - protein, 11 aa, synthetic construct [sequence omitted]

SEQ ID NO: 2030 - protein, 11 aa, synthetic construct [sequence omitted]

SEQ ID NO: 2031 - protein, 13 aa, synthetic construct [sequence omitted]

SEQ ID NO: 2032 - protein, 12 aa, synthetic construct [sequence omitted]

SEQ ID NO: 2033 - protein, 12 aa, synthetic construct [sequence omitted]

SEQ ID NO: 2034 - protein, 12 aa, synthetic construct [sequence omitted]

SEQ ID NO: 2035 - protein, 13 aa, synthetic construct [sequence omitted]

SEQ ID NO: 2036 - protein, 13 aa, synthetic construct [sequence omitted]

SEQ ID NO: 2037 - protein, 13 aa, synthetic construct [sequence omitted]

SEQ ID NO: 2038 - protein, 11 aa, synthetic construct [sequence omitted]

SEQ ID NO: 2039 - protein, 12 aa, synthetic construct [sequence omitted]

SEQ ID NO: 2040 - protein, 14 aa, synthetic construct [sequence omitted]

SEQ ID NO: 2041 - protein, 12 aa, synthetic construct [sequence omitted]

SEQ ID NO: 2042 - protein, 12 aa, synthetic construct [sequence omitted]

SEQ ID NO: 2043 - protein, 12 aa, synthetic construct [sequence omitted]

SEQ ID NO: 2044 - protein, 13 aa, synthetic construct [sequence omitted]

SEQ ID NO: 2045 - protein, 13 aa, synthetic construct [sequence omitted]

SEQ ID NO: 2046 - protein, 11 aa, synthetic construct [sequence omitted]

SEQ ID NO: 2047 - protein, 12 aa, synthetic construct [sequence omitted]

SEQ ID NO: 2048 - protein, 13 aa, synthetic construct [sequence omitted]

SEQ ID NO: 2049 - protein, 13 aa, synthetic construct [sequence omitted]

SEQ ID NO: 2050 - protein, 16 aa, synthetic construct
CCSYAGSSTLGIDWVF

SEQ ID NO: 2051 - protein, 15 aa, synthetic construct [sequence omitted]

SEQ ID NO: 2052 - protein, 15 aa, synthetic construct [sequence omitted]

SEQ ID NO: 2053 - protein, 13 aa, synthetic construct [sequence omitted]

SEQ ID NO: 2054 - protein, 13 aa, synthetic construct [sequence omitted]

SEQ ID NO: 2055 - protein, 13 aa, synthetic construct
CQVWDLYSAHVVF

SEQ ID NO: 2056 - protein, 13 aa, synthetic construct [sequence omitted]

SEQ ID NO: 2057 - protein, 11 aa, synthetic construct [sequence omitted]

SEQ ID NO: 2058 - protein, 12 aa, synthetic construct
CSAYAGSNNVVF

SEQ ID NO: 2059 - protein, 13 aa, synthetic construct [sequence omitted]

SEQ ID NO: 2060 - protein, 12 aa, synthetic construct
CQSADSSATWVF

SEQ ID NO: 2061 - protein, 13 aa, synthetic construct [sequence omitted]

SEQ ID NO: 2062 - protein, 13 aa, synthetic construct
CQSLDSSGTYWVF

SEQ ID NO: 2063 - protein, 11 aa, synthetic construct [sequence omitted]

SEQ ID NO: 2064 - protein, 11 aa, synthetic construct [sequence omitted]

SEQ ID NO: 2065 - protein, 11 aa, synthetic construct [sequence omitted]

SEQ ID NO: 2066 - protein, 13 aa, synthetic construct [sequence omitted]

SEQ ID NO: 2067 - protein, 10 aa, synthetic construct [sequence omitted]

SEQ ID NO: 2068 - protein, 13 aa, synthetic construct [sequence omitted]

SEQ ID NO: 2069 - protein, 13 aa, synthetic construct [sequence omitted]

SEQ ID NO: 2070 - protein, 13 aa, synthetic construct [sequence omitted]

SEQ ID NO: 2071 - protein, 12 aa, synthetic construct [sequence omitted]

SEQ ID NO: 2072 - protein, 9 aa, synthetic construct [sequence omitted]

SEQ ID NO: 2073 - protein, 11 aa, synthetic construct [sequence omitted]

SEQ ID NO: 2074 - protein, 11 aa, synthetic construct [sequence omitted]

SEQ ID NO: 2075 - protein, 11 aa, synthetic construct [sequence omitted]

SEQ ID NO: 2076 - protein, 11 aa, synthetic construct [sequence omitted]

SEQ ID NO: 2077 - protein, 13 aa, synthetic construct [sequence omitted]

SEQ ID NO: 2078 - protein, 13 aa, synthetic construct [sequence omitted]

SEQ ID NO: 2079 - protein, 13 aa, synthetic construct [sequence omitted]

SEQ ID NO: 2080 - protein, 13 aa, synthetic construct [sequence omitted]

SEQ ID NO: 2081 - protein, 11 aa, synthetic construct [sequence omitted]

SEQ ID NO: 2082 - protein, 12 aa, synthetic construct [sequence omitted]

SEQ ID NO: 2083 - protein, 12 aa, synthetic construct [sequence omitted]

SEQ ID NO: 2084 - protein, 13 aa, synthetic construct [sequence omitted]

SEQ ID NO: 2085 - protein, 11 aa, synthetic construct [sequence omitted]

SEQ ID NO: 2086 - protein, 12 aa, synthetic construct [sequence omitted]

SEQ ID NO: 2087 - protein, 12 aa, synthetic construct [sequence omitted]

SEQ ID NO: 2088 - protein, 13 aa, synthetic construct [sequence omitted]

SEQ ID NO: 2089 - protein, 13 aa, synthetic construct [sequence omitted]

SEQ ID NO: 2090 - protein, 13 aa, synthetic construct [sequence omitted]

SEQ ID NO: 2091 - protein, 13 aa, synthetic construct [sequence omitted]

SEQ ID NO: 2092 - protein, 13 aa, synthetic construct [sequence omitted]

SEQ ID NO: 2093 - protein, 13 aa, synthetic construct [sequence omitted]

SEQ ID NO: 2094 - protein, 12 aa, synthetic construct [sequence omitted]

SEQ ID NO: 2095 - protein, 12 aa, synthetic construct [sequence omitted]

SEQ ID NO: 2096 - protein, 12 aa, synthetic construct [sequence omitted]

SEQ ID NO: 2097 - protein, 12 aa, synthetic construct [sequence omitted]

SEQ ID NO: 2098 - protein, 13 aa, synthetic construct [sequence omitted]

SEQ ID NO: 2099 - protein, 13 aa, synthetic construct [sequence omitted]

SEQ ID NO: 2100 - protein, 13 aa, synthetic construct [sequence omitted]

SEQ ID NO: 2101 - protein, 11 aa, synthetic construct [sequence omitted]

SEQ ID NO: 2102 - protein, 11 aa, synthetic construct [sequence omitted]

SEQ ID NO: 2103 - protein, 12 aa, synthetic construct
CQVWDSSGSWVF

SEQ ID NO: 2104 - protein, 13 aa, synthetic construct [sequence omitted]

SEQ ID NO: 2105 - protein, 13 aa, synthetic construct
CNSRDTSGNYLVF

SEQ ID NO: 2106 - protein, 13 aa, synthetic construct [sequence omitted]

SEQ ID NO: 2107 - protein, 13 aa, synthetic construct [sequence omitted]

SEQ ID NO: 2108 - protein, 13 aa, synthetic construct [sequence omitted]

SEQ ID NO: 2109 - protein, 13 aa, synthetic construct [sequence omitted]

SEQ ID NO: 2110 - protein, 11 aa, synthetic construct [sequence omitted]

SEQ ID NO: 2111 - protein, 12 aa, synthetic construct [sequence omitted]

SEQ ID NO: 2112 - protein, 13 aa, synthetic construct [sequence omitted]

SEQ ID NO: 2113 - protein, 12 aa, synthetic construct [sequence omitted]

SEQ ID NO: 2114 - protein, 12 aa, synthetic construct [sequence omitted]

SEQ ID NO: 2115 - protein, 12 aa, synthetic construct [sequence omitted]

SEQ ID NO: 2116 - protein, 13 aa, synthetic construct [sequence omitted]

SEQ ID NO: 2117 - protein, 11 aa, synthetic construct [sequence omitted]

SEQ ID NO: 2118 - protein, 11 aa, synthetic construct [sequence omitted]

SEQ ID NO: 2119 - protein, 11 aa, synthetic construct
CQSANSGTWVF

SEQ ID NO: 2120 - protein, 11 aa, synthetic construct [sequence omitted]

SEQ ID NO: 2121 - protein, 12 aa, synthetic construct [sequence omitted]

SEQ ID NO: 2122 - protein, 13 aa, synthetic construct [sequence omitted]

SEQ ID NO: 2123 - protein, 13 aa, synthetic construct [sequence omitted]

SEQ ID NO: 2124 - protein, 13 aa, synthetic construct [sequence omitted]

SEQ ID NO: 2125 - protein, 13 aa, synthetic construct [sequence omitted]

SEQ ID NO: 2126 - protein, 13 aa, synthetic construct [sequence omitted]

SEQ ID NO: 2127 - protein, 13 aa, synthetic construct [sequence omitted]

SEQ ID NO: 2128 - protein, 13 aa, synthetic construct [sequence omitted]

SEQ ID NO: 2129 - protein, 13 aa, synthetic construct [sequence omitted]

SEQ ID NO: 2130 - protein, 13 aa, synthetic construct [sequence omitted]

SEQ ID NO: 2131 - protein, 11 aa, synthetic construct [sequence omitted]

SEQ ID NO: 2132 - protein, 12 aa, synthetic construct [sequence omitted]

SEQ ID NO: 2133 - protein, 12 aa, synthetic construct [sequence omitted]

SEQ ID NO: 2134 - protein, 12 aa, synthetic construct [sequence omitted]

SEQ ID NO: 2135 - protein, 12 aa, synthetic construct [sequence omitted]

SEQ ID NO: 2136 - protein, 13 aa, synthetic construct [sequence omitted]

SEQ ID NO: 2137 - protein, 13 aa, synthetic construct [sequence omitted]

SEQ ID NO: 2138 - protein, 7 aa, synthetic construct
CQATEVF

SEQ ID NO: 2139 - protein, 10 aa, synthetic construct [sequence omitted]

SEQ ID NO: 2140 - protein, 11 aa, synthetic construct [sequence omitted]

SEQ ID NO: 2141 - protein, 11 aa, synthetic construct [sequence omitted]

SEQ ID NO: 2142 - protein, 12 aa, synthetic construct [sequence omitted]

SEQ ID NO: 2143 - protein, 13 aa, synthetic construct [sequence omitted]

SEQ ID NO: 2144 - protein, 10 aa, synthetic construct
CCSYAQGVVF

SEQ ID NO: 2145 - protein, 13 aa, synthetic construct [sequence omitted]

SEQ ID NO: 2146 - protein, 13 aa, synthetic construct [sequence omitted]

SEQ ID NO: 2147 - protein, 13 aa, synthetic construct [sequence omitted]

SEQ ID NO: 2148 - protein, 13 aa, synthetic construct [sequence omitted]

SEQ ID NO: 2149 - protein, 13 aa, synthetic construct [sequence omitted]

SEQ ID NO: 2150 - protein, 13 aa, synthetic construct [sequence omitted]

SEQ ID NO: 2151 - protein, 13 aa, synthetic construct [sequence omitted]

SEQ ID NO: 2152 - protein, 13 aa, synthetic construct [sequence omitted]

SEQ ID NO: 2153 - protein, 13 aa, synthetic construct [sequence omitted]

SEQ ID NO: 2154 - protein, 13 aa, synthetic construct [sequence omitted]

SEQ ID NO: 2155 - protein, 13 aa, synthetic construct [sequence omitted]

SEQ ID NO: 2156 - protein, 13 aa, synthetic construct [sequence omitted]

SEQ ID NO: 2157 - protein, 11 aa, synthetic construct [sequence omitted]

SEQ ID NO: 2158 - protein, 12 aa, synthetic construct [sequence omitted]

SEQ ID NO: 2159 - protein, 13 aa, synthetic construct [sequence omitted]

SEQ ID NO: 2160 - protein, 13 aa, synthetic construct [sequence omitted]

SEQ ID NO: 2161 - protein, 14 aa, synthetic construct [sequence omitted]

SEQ ID NO: 2162 - protein, 11 aa, synthetic construct
CMIWHSSAIVF

SEQ ID NO: 2163 - protein, 11 aa, synthetic construct [sequence omitted]

SEQ ID NO: 2164 - protein, 11 aa, synthetic construct [sequence omitted]

SEQ ID NO: 2165 - protein, 13 aa, synthetic construct [sequence omitted]

SEQ ID NO: 2166 - protein, 13 aa, synthetic construct [sequence omitted]

SEQ ID NO: 2167 - protein, 13 aa, synthetic construct [sequence omitted]

SEQ ID NO: 2168 - protein, 13 aa, synthetic construct [sequence omitted]

SEQ ID NO: 2169 - protein, 13 aa, synthetic construct [sequence omitted]

SEQ ID NO: 2170 - protein, 13 aa, synthetic construct [sequence omitted]

SEQ ID NO: 2171 - protein, 13 aa, synthetic construct [sequence omitted]

SEQ ID NO: 2172 - protein, 12 aa, synthetic construct [sequence omitted]

SEQ ID NO: 2173 - protein, 12 aa, synthetic construct [sequence omitted]

SEQ ID NO: 2174 - protein, 12 aa, synthetic construct [sequence omitted]

SEQ ID NO: 2175 - protein, 13 aa, synthetic construct [sequence omitted]

SEQ ID NO: 2176 - protein, 11 aa, synthetic construct [sequence omitted]

SEQ ID NO: 2177 - protein, 13 aa, synthetic construct [sequence omitted]

SEQ ID NO: 2178 - protein, 13 aa, synthetic construct [sequence omitted]

SEQ ID NO: 2179 - protein, 12 aa, synthetic construct
CCSYAGTISWVF

SEQ ID NO: 2180 - protein, 12 aa, synthetic construct [sequence omitted]

SEQ ID NO: 2181 - protein, 12 aa, synthetic construct [sequence omitted]

SEQ ID NO: 2182 - protein, 12 aa, synthetic construct [sequence omitted]

SEQ ID NO: 2183 - protein, 13 aa, synthetic construct [sequence omitted]

SEQ ID NO: 2184 - protein, 13 aa, synthetic construct [sequence omitted]

SEQ ID NO: 2185 - protein, 14 aa, synthetic construct [sequence omitted]

SEQ ID NO: 2186 - protein, 11 aa, synthetic construct [sequence omitted]

SEQ ID NO: 2187 - protein, 11 aa, synthetic construct
CYSTDSSGKIF

SEQ ID NO: 2188 - protein, 13 aa, synthetic construct [sequence omitted]

SEQ ID NO: 2189 - protein, 13 aa, synthetic construct [sequence omitted]

SEQ ID NO: 2190 - protein, 13 aa, synthetic construct [sequence omitted]

SEQ ID NO: 2191 - protein, 13 aa, synthetic construct [sequence omitted]

SEQ ID NO: 2192 - protein, 13 aa, synthetic construct [sequence omitted]

SEQ ID NO: 2193 - protein, 13 aa, synthetic construct [sequence omitted]

SEQ ID NO: 2194 - protein, 12 aa, synthetic construct [sequence omitted]

SEQ ID NO: 2195 - protein, 12 aa, synthetic construct [sequence omitted]

SEQ ID NO: 2196 - protein, 13 aa, synthetic construct [sequence omitted]

SEQ ID NO: 2197 - protein, 13 aa, synthetic construct [sequence omitted]

SEQ ID NO: 2198 - protein, 13 aa, synthetic construct [sequence omitted]

SEQ ID NO: 2199 - protein, 13 aa, synthetic construct [sequence omitted]

SEQ ID NO: 2200 - protein, 11 aa, synthetic construct [sequence omitted]

SEQ ID NO: 2201 - protein, 13 aa, synthetic construct
CQSYDGTLGGWIF

SEQ ID NO: 2202 - protein, 13 aa, synthetic construct [sequence omitted]

SEQ ID NO: 2203 - protein, 11 aa, synthetic construct [sequence omitted]

SEQ ID NO: 2204 - protein, 11 aa, synthetic construct [sequence omitted]

SEQ ID NO: 2205 - protein, 13 aa, synthetic construct [sequence omitted]

SEQ ID NO: 2206 - protein, 13 aa, synthetic construct [sequence omitted]

SEQ ID NO: 2207 - protein, 10 aa, synthetic construct
CSSYAGSNNF

SEQ ID NO: 2208 - protein, 13 aa, synthetic construct [sequence omitted]

SEQ ID NO: 2209 - protein, 13 aa, synthetic construct [sequence omitted]

SEQ ID NO: 2210 - protein, 11 aa, synthetic construct [sequence omitted]

SEQ ID NO: 2211 - protein, 13 aa, synthetic construct [sequence omitted]

SEQ ID NO: 2212 - protein, 12 aa, synthetic construct [sequence omitted]

SEQ ID NO: 2213 - protein, 12 aa, synthetic construct [sequence omitted]

SEQ ID NO: 2214 - protein, 11 aa, synthetic construct [sequence omitted]

SEQ ID NO: 2215 - protein, 9 aa, synthetic construct
GGSISSSSY

SEQ ID NO: 2216 - protein, 7 aa, synthetic construct
GFTFSNA

SEQ ID NO: 2217 - protein, 7 aa, synthetic construct
GFTFDDY

SEQ ID NO: 2218 - protein, 7 aa, synthetic construct
GFTFSSY

SEQ ID NO: 2219 - protein, 7 aa, synthetic construct
GFTFSSS

SEQ ID NO: 2220 - protein, 7 aa, synthetic construct
GFTFSSY

SEQ ID NO: 2221 - protein, 7 aa, synthetic construct
GYTFTSY

SEQ ID NO: 2222 - protein, 7 aa, synthetic construct
GFTFSSY

SEQ ID NO: 2223 - protein, 7 aa, synthetic construct
GGSFSGY

SEQ ID NO: 2224 - protein, 7 aa, synthetic construct
GFTFSSY

SEQ ID NO: 2225 - protein, 7 aa, synthetic construct
GYTFTSY

SEQ ID NO: 2226 - protein, 7 aa, synthetic construct
GGSFSGY

SEQ ID NO: 2227 - protein, 7 aa, synthetic construct
GFTVSSN

SEQ ID NO: 2228 - protein, 7 aa, synthetic construct
GFTFSTY

SEQ ID NO: 2229 - protein, 7 aa, synthetic construct
GFTFSSY

SEQ ID NO: 2230 - protein, 7 aa, synthetic construct
GYTFTTY

SEQ ID NO: 2231 - protein, 7 aa, synthetic construct
GFTFSVS

SEQ ID NO: 2232 - protein, 7 aa, synthetic construct
GFTFSNA

SEQ ID NO: 2233 - protein, 7 aa, synthetic construct
GFTFDDY

SEQ ID NO: 2234 - protein, 7 aa, synthetic construct
GFTFSDA

SEQ ID NO: 2235 - protein, 7 aa, synthetic construct
GFTFDDY

SEQ ID NO: 2236 - protein, 7 aa, synthetic construct
GFTVSSN

SEQ ID NO: 2237 - protein, 7 aa, synthetic construct
GYTFTSF

SEQ ID NO: 2238 - protein, 7 aa, synthetic construct
GFTFSGS

SEQ ID NO: 2239 - protein, 7 aa, synthetic construct
GFTVSSN

SEQ ID NO: 2240 - protein, 7 aa, synthetic construct
GFTFSSY

SEQ ID NO: 2241 - protein, 7 aa, synthetic construct
GFTFSSY

SEQ ID NO: 2242 - protein, 7 aa, synthetic construct
GFTFSSY

SEQ ID NO: 2243 - protein, 7 aa, synthetic construct
GFTFSSY

SEQ ID NO: 2244 - protein, 7 aa, synthetic construct
GFTFSSY

SEQ ID NO: 2245 - protein, 7 aa, synthetic construct
GFTFSSY

SEQ ID NO: 2246 - protein, 7 aa, synthetic construct
GFTFSSY

SEQ ID NO: 2247 - protein, 7 aa, synthetic construct
GFTFSSY

SEQ ID NO: 2248 - protein, 7 aa, synthetic construct
GFPFSNS

SEQ ID NO: 2249 - protein, 7 aa, synthetic construct
GYTFTGY

SEQ ID NO: 2250 - protein, 7 aa, synthetic construct
GFTFSNA

SEQ ID NO: 2251 - protein, 7 aa, synthetic construct
GYTFTSY

SEQ ID NO: 2252 - protein, 7 aa, synthetic construct
GFTFSSY

SEQ ID NO: 2253 - protein, 7 aa, synthetic construct
GYSFTSY

SEQ ID NO: 2254 - protein, 7 aa, synthetic construct
GFTFSSY

SEQ ID NO: 2255 - protein, 7 aa, synthetic construct
GYTFTGY

SEQ ID NO: 2256 - protein, 7 aa, synthetic construct
GFTFSSY

SEQ ID NO: 2257 - protein, 7 aa, synthetic construct
GFTFSNA

SEQ ID NO: 2258 - protein, 7 aa, synthetic construct
GFTFSSY

SEQ ID NO: 2259 - protein, 7 aa, synthetic construct
GFTFSSY

SEQ ID NO: 2260 - protein, 7 aa, synthetic construct
GFTFSSY

SEQ ID NO: 2261 - protein, 7 aa, synthetic construct
GFTFSSY

SEQ ID NO: 2262 - protein, 7 aa, synthetic construct
GFTFDDY

SEQ ID NO: 2263 - protein, 7 aa, synthetic construct
GYSFTSY

SEQ ID NO: 2264 - protein, 7 aa, synthetic construct
GYTFTGY

SEQ ID NO: 2265 - protein, 7 aa, synthetic construct
GFTFDDH

SEQ ID NO: 2266 - protein, 7 aa, synthetic construct
GFTFDDY

SEQ ID NO: 2267 - protein, 7 aa, synthetic construct
GFTFSSY

SEQ ID NO: 2268 - protein, 7 aa, synthetic construct
GFTFSSY

SEQ ID NO: 2269 - protein, 7 aa, synthetic construct
GYTFTSY

SEQ ID NO: 2270 - protein, 7 aa, synthetic construct
GFTFSSY

SEQ ID NO: 2271 - protein, 7 aa, synthetic construct
GFTFSGS

SEQ ID NO: 2272 - protein, 7 aa, synthetic construct
GFTFSSY

SEQ ID NO: 2273 - protein, 7 aa, synthetic construct
GYTLTEL

SEQ ID NO: 2274 - protein, 7 aa, synthetic construct
GYTLTEL

SEQ ID NO: 2275 - protein, 7 aa, synthetic construct
GFTFSSY

SEQ ID NO: 2276 - protein, 7 aa, synthetic construct
GFTFSNA

SEQ ID NO: 2277 - protein, 7 aa, synthetic construct
GFTFSSY

SEQ ID NO: 2278 - protein, 7 aa, synthetic construct
GFTFSSY

SEQ ID NO: 2279 - protein, 8 aa, synthetic construct
GGSISSSD

SEQ ID NO: 2280 - protein, 7 aa, synthetic construct
GGSFSGY

SEQ ID NO: 2281 - protein, 7 aa, synthetic construct
GFTFSSY

SEQ ID NO: 2282 - protein, 9 aa, synthetic construct
GFSLSTSGV

SEQ ID NO: 2283 - protein, 7 aa, synthetic construct
GYTFTSY

SEQ ID NO: 2284 - protein, 7 aa, synthetic construct
GFTFSRY

SEQ ID NO: 2285 - protein, 7 aa, synthetic construct
GFTFSSS

SEQ ID NO: 2286 - protein, 7 aa, synthetic construct
GFTFSSY

SEQ ID NO: 2287 - protein, 7 aa, synthetic construct
GFTFSSY

SEQ ID NO: 2288 - protein, 7 aa, synthetic construct
GFTFSSY

SEQ ID NO: 2289 - protein, 7 aa, synthetic construct
GFTFSDY

SEQ ID NO: 2290 - protein, 7 aa, synthetic construct
GFTFSEY

SEQ ID NO: 2291 - protein, 7 aa, synthetic construct
GFTFSSY

SEQ ID NO: 2292 - protein, 7 aa, synthetic construct
GFTFDDY

SEQ ID NO: 2293 - protein, 7 aa, synthetic construct
GFTFSDY

SEQ ID NO: 2294 - protein, 7 aa, synthetic construct
GFTFSSY

SEQ ID NO: 2295 - protein, 7 aa, synthetic construct
GFTFSSY

SEQ ID NO: 2296 - protein, 7 aa, synthetic construct
GFTFSSY

SEQ ID NO: 2297 - protein, 7 aa, synthetic construct
GYTLTEL

SEQ ID NO: 2298 - protein, 7 aa, synthetic construct
GFTFSSY

SEQ ID NO: 2299 - protein, 7 aa, synthetic construct
GFTFSNY

SEQ ID NO: 2300 - protein, 7 aa, synthetic construct
GFTFSNA

SEQ ID NO: 2301 - protein, 7 aa, synthetic construct
GYSFTSY

SEQ ID NO: 2302 - protein, 7 aa, synthetic construct
GFTFSSY

SEQ ID NO: 2303 - protein, 9 aa, synthetic construct
GFSLSTSGV

SEQ ID NO: 2304 - protein, 7 aa, synthetic construct
GYTFSSY

SEQ ID NO: 2305 - protein, 7 aa, synthetic construct
YMHWVRQ

SEQ ID NO: 2306 - protein, 7 aa, synthetic construct
GYTFTDH

SEQ ID NO: 2307 - protein, 7 aa, synthetic construct
GFTFDDY

SEQ ID NO: 2308 - protein, 8 aa, synthetic construct
GGSITSSN

SEQ ID NO: 2309 - protein, 7 aa, synthetic construct
GFTFSSY

SEQ ID NO: 2310 - protein, 7 aa, synthetic construct
GYTFTSY

SEQ ID NO: 2311 - protein, 7 aa, synthetic construct
GFTFSSY

SEQ ID NO: 2312 - protein, 7 aa, synthetic construct
GYTLTEL

SEQ ID NO: 2313 - protein, 7 aa, synthetic construct
GYTVTRH

SEQ ID NO: 2314 - protein, 7 aa, synthetic construct
GYAFRGQ

SEQ ID NO: 2315 - protein, 7 aa, synthetic construct
GFTFSDS

SEQ ID NO: 2316 - protein, 9 aa, synthetic construct
GFSLSTSGV

SEQ ID NO: 2317 - protein, 7 aa, synthetic construct
GYTFTSY

SEQ ID NO: 2318 - protein, 7 aa, synthetic construct
GFTFDDY

SEQ ID NO: 2319 - protein, 7 aa, synthetic construct
GFTFDDY

SEQ ID NO: 2320 - protein, 7 aa, synthetic construct
GFTFSNA

SEQ ID NO: 2321 - protein, 9 aa, synthetic construct
GDSVSSNSA

SEQ ID NO: 2322 - protein, 7 aa, synthetic construct
GYTFTRN

SEQ ID NO: 2323 - protein, 7 aa, synthetic construct
GYTFTTY

SEQ ID NO: 2324 - protein, 7 aa, synthetic construct
GFTFSSY

SEQ ID NO: 2325 - protein, 7 aa, synthetic construct
GYTFTSY

SEQ ID NO: 2326 - protein, 7 aa, synthetic construct
GFTFSNA

SEQ ID NO: 2327 - protein, 9 aa, synthetic construct
GDSVSSNSA

SEQ ID NO: 2328 - protein, 7 aa, synthetic construct
GFTFSTY

SEQ ID NO: 2329 - protein, 7 aa, synthetic construct
GYSFTGY

SEQ ID NO: 2330 - protein, 9 aa, synthetic construct
GGSISSSSY

SEQ ID NO: 2331 - protein, 9 aa, synthetic construct
GDSVSSNSA

SEQ ID NO: 2332 - protein, 9 aa, synthetic construct
GDSVSSNSA

SEQ ID NO: 2333 - protein, 7 aa, synthetic construct
GGSFSGH

SEQ ID NO: 2334 - protein, 9 aa, synthetic construct
GDSVSSNSA

SEQ ID NO: 2335 - protein, 7 aa, synthetic construct
GFIFSSY

SEQ ID NO: 2336 - protein, 7 aa, synthetic construct
GFDFTNA

SEQ ID NO: 2337 - protein, 7 aa, synthetic construct
RFTFSSA

SEQ ID NO: 2338 - protein, 9 aa, synthetic construct
GGSISSSSY

SEQ ID NO: 2339 - protein, 9 aa, synthetic construct
GGSISSSSY

SEQ ID NO: 2340 - protein, 7 aa, synthetic construct
GGSFSGY

SEQ ID NO: 2341 - protein, 9 aa, synthetic construct
GGSISSSSY

SEQ ID NO: 2342 - protein, 7 aa, synthetic construct
GGSFSGY

SEQ ID NO: 2343 - protein, 7 aa, synthetic construct
GYTFTSY

SEQ ID NO: 2344 - protein, 5 aa, synthetic construct
YYSGS

SEQ ID NO: 2345 - protein, 8 aa, synthetic construct
KSKTDGGT

SEQ ID NO: 2346 - protein, 6 aa, synthetic construct
NWNGGS

SEQ ID NO: 2347 - protein, 6 aa, synthetic construct
SSSSST

SEQ ID NO: 2348 - protein, 5 aa, synthetic construct
YTTGD

SEQ ID NO: 2349 - protein, 6 aa, synthetic construct
SGSGGS

SEQ ID NO: 2350 - protein, 6 aa, synthetic construct
SAYNGN

SEQ ID NO: 2351 - protein, 6 aa, synthetic construct
SGSGGS

SEQ ID NO: 2352 - protein, 5 aa, synthetic construct
NHSGS

SEQ ID NO: 2353 - protein, 6 aa, synthetic construct
WYDGSN

SEQ ID NO: 2354 - protein, 6 aa, synthetic construct
SAYNGN

SEQ ID NO: 2355 - protein, 5 aa, synthetic construct
NHSGS

SEQ ID NO: 2356 - protein, 5 aa, synthetic construct
YSGGS

SEQ ID NO: 2357 - protein, 6 aa, synthetic construct
SGSSSY

SEQ ID NO: 2358 - protein, 5 aa, synthetic construct
GTAGD

SEQ ID NO: 2359 - protein, 6 aa, synthetic construct
SAYNGN

SEQ ID NO: 2360 - protein, 8 aa, synthetic construct
RSKANSYA

SEQ ID NO: 2361 - protein, 8 aa, synthetic construct
KSKTDGGT

SEQ ID NO: 2362 - protein, 6 aa, synthetic construct
SWNSGS

SEQ ID NO: 2363 - protein, 8 aa, synthetic construct
KSKTDGGT

SEQ ID NO: 2364 - protein, 6 aa, synthetic construct
NWNGGS

SEQ ID NO: 2365 - protein, 5 aa, synthetic construct
YSGGS

SEQ ID NO: 2366 - protein, 6 aa, synthetic construct
SAYNDN

SEQ ID NO: 2367 - protein, 8 aa, synthetic construct
RSKANSYA

SEQ ID NO: 2368 - protein, 5 aa, synthetic construct
YSGGS

SEQ ID NO: 2369 - protein, 6 aa, synthetic construct
SSSSSY

SEQ ID NO: 2370 - protein, 5 aa, synthetic construct
GTAGD

SEQ ID NO: 2371 - protein, 6 aa, synthetic construct
SSSSSY

SEQ ID NO: 2372 - protein, 6 aa, synthetic construct
KQDGSE

SEQ ID NO: 2373 - protein, 6 aa, synthetic construct
SGSGGS

SEQ ID NO: 2374 - protein, 6 aa, synthetic construct
SGSGGS

SEQ ID NO: 2375 - protein, 6 aa, synthetic construct
SGSGGS

SEQ ID NO: 2376 - protein, 6 aa, synthetic construct
WYDGSN

SEQ ID NO: 2377 - protein, 6 aa, synthetic construct
SYDGNS

SEQ ID NO: 2378 - protein, 6 aa, synthetic construct
NPNSGG

SEQ ID NO: 2379 - protein, 8 aa, synthetic construct
KSKTDGGT

SEQ ID NO: 2380 - protein, 6 aa, synthetic construct
NPNSGN

SEQ ID NO: 2381 - protein, 6 aa, synthetic construct
SYDGSN

SEQ ID NO: 2382 - protein, 6 aa, synthetic construct
YPGDSD

SEQ ID NO: 2383 - protein, 6 aa, synthetic construct
SSSSSY

SEQ ID NO: 2384 - protein, 6 aa, synthetic construct
NPNSGG

SEQ ID NO: 2385 - protein, 5 aa, synthetic construct
GTAGD

SEQ ID NO: 2386 - protein, 8 aa, synthetic construct
KSKTDGGT

SEQ ID NO: 2387 - protein, 6 aa, synthetic construct
SGSGGS

SEQ ID NO: 2388 - protein, 6 aa, synthetic construct
SGSGGS

SEQ ID NO: 2389 - protein, 6 aa, synthetic construct
SGSGGS

SEQ ID NO: 2390 - protein, 6 aa, synthetic construct
WYDGSN

SEQ ID NO: 2391 - protein, 6 aa, synthetic construct
NWNGGS

SEQ ID NO: 2392 - protein, 6 aa, synthetic construct
YPGDSD

SEQ ID NO: 2393 - protein, 6 aa, synthetic construct
NPNSGG

SEQ ID NO: 2394 - protein, 6 aa, synthetic construct
TWNSNI

SEQ ID NO: 2395 - protein, 6 aa, synthetic construct
SWNSGS

SEQ ID NO: 2396 - protein, 6 aa, synthetic construct
NSDGGN

SEQ ID NO: 2397 - protein, 6 aa, synthetic construct
KQDGSE

SEQ ID NO: 2398 - protein, 6 aa, synthetic construct
NPNSGN

SEQ ID NO: 2399 - protein, 6 aa, synthetic construct
WYDGSN

SEQ ID NO: 2400 - protein, 8 aa, synthetic construct
RSKANSYA

SEQ ID NO: 2401 - protein, 6 aa, synthetic construct
SSSSSY

SEQ ID NO: 2402 - protein, 6 aa, synthetic construct
DPEDGE

SEQ ID NO: 2403 - protein, 6 aa, synthetic construct
DPEDGE

SEQ ID NO: 2404 - protein, 6 aa, synthetic construct
SSSSST

SEQ ID NO: 2405 - protein, 8 aa, synthetic construct
KSKTDGGT

SEQ ID NO: 2406 - protein, 6 aa, synthetic construct
SSSSSY

SEQ ID NO: 2407 - protein, 6 aa, synthetic construct
SGSGGS

SEQ ID NO: 2408 - protein, 5 aa, synthetic construct
NHSGT

SEQ ID NO: 2409 - protein, 5 aa, synthetic construct
NHSGS

SEQ ID NO: 2410 - protein, 6 aa, synthetic construct
KQDGSE

SEQ ID NO: 2411 - protein, 5 aa, synthetic construct
YWNDD

SEQ ID NO: 2412 - protein, 6 aa, synthetic construct
SAYNGN

SEQ ID NO: 2413 - protein, 5 aa, synthetic construct
NTAGD

SEQ ID NO: 2414 - protein, 5 aa, synthetic construct
YTTGD

SEQ ID NO: 2415 - protein, 6 aa, synthetic construct
SSSSST

SEQ ID NO: 2416 - protein, 6 aa, synthetic construct
SGSGGS

SEQ ID NO: 2417 - protein, 6 aa, synthetic construct
SYDGSN

SEQ ID NO: 2418 - protein, 6 aa, synthetic construct
SSSGST

SEQ ID NO: 2419 - protein, 6 aa, synthetic construct
NSDGSR

SEQ ID NO: 2420 - protein, 6 aa, synthetic construct
NSDGSG

SEQ ID NO: 2421 - protein, 6 aa, synthetic construct
SWNSGS

SEQ ID NO: 2422 - protein, 6 aa, synthetic construct
SHSGTT

SEQ ID NO: 2423 - protein, 6 aa, synthetic construct
NDSGYS

SEQ ID NO: 2424 - protein, 5 aa, synthetic construct
GTAGD

SEQ ID NO: 2425 - protein, 6 aa, synthetic construct
SSSSST

SEQ ID NO: 2426 - protein, 6 aa, synthetic construct
DPEDGE

SEQ ID NO: 2427 - protein, 6 aa, synthetic construct
SSSSSY

SEQ ID NO: 2428 - protein, 6 aa, synthetic construct
WSDGSN

SEQ ID NO: 2429 - protein, 8 aa, synthetic construct
KSKTDGGT

SEQ ID NO: 2430 - protein, 6 aa, synthetic construct
YPGDSD

SEQ ID NO: 2431 - protein, 6 aa, synthetic construct
KQDGSE

SEQ ID NO: 2432 - protein, 5 aa, synthetic construct
YWNDD

SEQ ID NO: 2433 - protein, 6 aa, synthetic construct
SAYNGN

SEQ ID NO: 2434 - protein, 6 aa, synthetic construct
NYAQKF

SEQ ID NO: 2435 - protein, 6 aa, synthetic construct
NPNSGG

SEQ ID NO: 2436 - protein, 6 aa, synthetic construct
SWNSGS

SEQ ID NO: 2437 - protein, 5 aa, synthetic construct
YHSGN

SEQ ID NO: 2438 - protein, 6 aa, synthetic construct
SSSSSY

SEQ ID NO: 2439 - protein, 6 aa, synthetic construct
NTNTGN

SEQ ID NO: 2440 - protein, 6 aa, synthetic construct
SSSSSY

SEQ ID NO: 2441 - protein, 6 aa, synthetic construct
DPEDGE

SEQ ID NO: 2442 - protein, 6 aa, synthetic construct
NTNTGT

SEQ ID NO: 2443 - protein, 6 aa, synthetic construct
RPNSGD

SEQ ID NO: 2444 - protein, 8 aa, synthetic construct
RGKPNTYA

SEQ ID NO: 2445 - protein, 5 aa, synthetic construct
YWNDD

SEQ ID NO: 2446 - protein, 6 aa, synthetic construct
SAYNGN

SEQ ID NO: 2447 - protein, 6 aa, synthetic construct
SWNSGS

SEQ ID NO: 2448 - protein, 6 aa, synthetic construct
SRNSGS

SEQ ID NO: 2449 - protein, 8 aa, synthetic construct
KSKTDGGT

SEQ ID NO: 2450 - protein, 7 aa, synthetic construct
YYRSKWY

SEQ ID NO: 2451 - protein, 6 aa, synthetic construct
DTHTGN

SEQ ID NO: 2452 - protein, 6 aa, synthetic construct
SAYNGN

SEQ ID NO: 2453 - protein, 6 aa, synthetic construct
KQDGSE

SEQ ID NO: 2454 - protein, 6 aa, synthetic construct
SAYNGN

SEQ ID NO: 2455 - protein, 8 aa, synthetic construct
KSKTDGGT

SEQ ID NO: 2456 - protein, 7 aa, synthetic construct
YYRSKWY

SEQ ID NO: 2457 - protein, 6 aa, synthetic construct
SSRSSY

SEQ ID NO: 2458 - protein, 6 aa, synthetic construct
NPNSGG

SEQ ID NO: 2459 - protein, 5 aa, synthetic construct
YYSGS

SEQ ID NO: 2460 - protein, 7 aa, synthetic construct
YYRSKWY

SEQ ID NO: 2461 - protein, 7 aa, synthetic construct
YYRSKWY

SEQ ID NO: 2462 - protein, 5 aa, synthetic construct
NHSGF

SEQ ID NO: 2463 - protein, 7 aa, synthetic construct
YYRSKWY

SEQ ID NO: 2464 - protein, 6 aa, synthetic construct
SGSSSF

SEQ ID NO: 2465 - protein, 8 aa, synthetic construct
KSKTDGGS

SEQ ID NO: 2466 - protein, 8 aa, synthetic construct
KTKTEGGT

SEQ ID NO: 2467 - protein, 5 aa, synthetic construct
YYSGS

SEQ ID NO: 2468 - protein, 5 aa, synthetic construct
YYSGS

SEQ ID NO: 2469 - protein, 5 aa, synthetic construct
NHSGS

SEQ ID NO: 2470 - protein, 5 aa, synthetic construct
YYSGS

SEQ ID NO: 2471 - protein, 5 aa, synthetic construct
NHSGS

SEQ ID NO: 2472 - protein, 6 aa, synthetic construct
NPKNGY

SEQ ID NO: 2473 - protein, 12 aa, synthetic construct
CASLTGDRFDYW

SEQ ID NO: 2474 - protein, 15 aa, synthetic construct
CTGRPSIAARHFDYW

SEQ ID NO: 2475 - protein, 19 aa, synthetic construct
CARERLTIFGVVNYYMDVW

SEQ ID NO: 2476 - protein, 9 aa, synthetic construct
CARDGWDYW

SEQ ID NO: 2477 - protein, 16 aa, synthetic construct
CARGYSGSYYGDFDYW

SEQ ID NO: 2478 - protein, 14 aa, synthetic construct
CAKKPPRDSAFDYW

SEQ ID NO: 2479 - protein, 15 aa, synthetic construct
CARENSGSYYWFDPW

SEQ ID NO: 2480 - protein, 12 aa, synthetic construct
CAKLEYSSPDYW

SEQ ID NO: 2481 - protein, 18 aa, synthetic construct
CAREGLLVGATLDAFDIW

SEQ ID NO: 2482 - protein, 17 aa, synthetic construct
CARDTGITMVRGVFDYW

SEQ ID NO: 2483 - protein, 20 aa, synthetic construct
CARDRTGISAAGPSNWFDPW

SEQ ID NO: 2484 - protein, 14 aa, synthetic construct
CARTSLAAADFDYW

SEQ ID NO: 2485 - protein, 17 aa, synthetic construct
CARAPDYYGSGSLFDYW

SEQ ID NO: 2486 - protein, 11 aa, synthetic construct
CASHWGHFDYW

SEQ ID NO: 2487 - protein, 10 aa, synthetic construct
CARDRTLDYW

SEQ ID NO: 2488 - protein, 9 aa, synthetic construct
CARQIGDYW

SEQ ID NO: 2489 - protein, 8 aa, synthetic construct
CTGPFDNW

SEQ ID NO: 2490 - protein, 8 aa, synthetic construct [sequence omitted]

SEQ ID NO: 2491 - protein, 10 aa, synthetic construct
CAKARSFDIW

SEQ ID NO: 2492 - protein, 8 aa, synthetic construct
CRADMDVW

SEQ ID NO: 2493 - protein, 10 aa, synthetic construct [sequence omitted]

SEQ ID NO: 2494 - protein, 11 aa, synthetic construct [sequence omitted]

SEQ ID NO: 2495 - protein, 10 aa, synthetic construct
CARGASFDFW

SEQ ID NO: 2496 - protein, 8 aa, synthetic construct
CTGPFDYW

SEQ ID NO: 2497 - protein, 11 aa, synthetic construct
CARSFDAFDIW

SEQ ID NO: 2498 - protein, 11 aa, synthetic construct
CAGLTGELDYW

SEQ ID NO: 2499 - protein, 12 aa, synthetic construct
CARWGTGGFDYW

SEQ ID NO: 2500 - protein, 11 aa, synthetic construct
CARREGFFDYW

SEQ ID NO: 2501 - protein, 11 aa, synthetic construct
CARDQLAPDYW

SEQ ID NO: 2502 - protein, 11 aa, synthetic construct
CAKDSSGFDYW

SEQ ID NO: 2503 - protein, 11 aa, synthetic construct
CAKDPQFFDYW

SEQ ID NO: 2504 - protein, 11 aa, synthetic construct
CAKDGTAFDIW

SEQ ID NO: 2505 - protein, 12 aa, synthetic construct
CARDRGWGLDYW

SEQ ID NO: 2506 - protein, 12 aa, synthetic construct
CARGELGDFDYW

SEQ ID NO: 2507 - protein, 12 aa, synthetic construct
CARVLELYFDYW

SEQ ID NO: 2508 - protein, 10 aa, synthetic construct
CTTRSDFQHW

SEQ ID NO: 2509 - protein, 13 aa, synthetic construct
CARDQELRVFDYW

SEQ ID NO: 2510 - protein, 13 aa, synthetic construct
CAKASGYGPFDYW

SEQ ID NO: 2511 - protein, 13 aa, synthetic construct
CARHSSSSHFDYW

SEQ ID NO: 2512 - protein, 13 aa, synthetic construct
CARDRGNSLFDYW

SEQ ID NO: 2513 - protein, 13 aa, synthetic construct
CARDKSLEWFDYW

SEQ ID NO: 2514 - protein, 14 aa, synthetic construct
CARGDWNYGGFDYW

SEQ ID NO: 2515 - protein, 11 aa, synthetic construct
CTTAPDAFDIW

SEQ ID NO: 2516 - protein, 13 aa, synthetic construct
CASGITGTTGDYW

SEQ ID NO: 2517 - protein, 13 aa, synthetic construct
CAKEGAHDAFDIW

SEQ ID NO: 2518 - protein, 13 aa, synthetic construct
CAKDKGELPFDYW

SEQ ID NO: 2519 - protein, 13 aa, synthetic construct
CAKLGVRDYMDVW

SEQ ID NO: 2520 - protein, 13 aa, synthetic construct
CAREGGGWVFDYW

SEQ ID NO: 2521 - protein, 13 aa, synthetic construct
CARGGGGDPFDYW

SEQ ID NO: 2522 - protein, 13 aa, synthetic construct
CARPYNWNSFDYW

SEQ ID NO: 2523 - protein, 13 aa, synthetic construct
CAKDNDWNGFDYW

SEQ ID NO: 2524 - protein, 13 aa, synthetic construct
CAKDNWNYAFDIW

SEQ ID NO: 2525 - protein, 13 aa, synthetic construct
CARDLDWTLFDYW

SEQ ID NO: 2526 - protein, 14 aa, synthetic construct
CAGDYSNYGWFDPW

SEQ ID NO: 2527 - protein, 14 aa, synthetic construct
CARARDSGYYMDVW

SEQ ID NO: 2528 - protein, 14 aa, synthetic construct
CARATAMVTGIDYW

SEQ ID NO: 2529 - protein, 12 aa, synthetic construct
CTGSSGSYFDYW

SEQ ID NO: 2530 - protein, 14 aa, synthetic construct
CARSPYNWNYVDYW

SEQ ID NO: 2531 - protein, 14 aa, synthetic construct
CATEGPSTFSFDYW

SEQ ID NO: 2532 - protein, 14 aa, synthetic construct
CATANWNDEAFDIW

SEQ ID NO: 2533 - protein, 14 aa, synthetic construct
CARDELTGDAFDIW

SEQ ID NO: 2534 - protein, 12 aa, synthetic construct
CTTEALGIFDYW

SEQ ID NO: 2535 - protein, 14 aa, synthetic construct
CARDGSSGFLFDYW

SEQ ID NO: 2536 - protein, 14 aa, synthetic construct
CAKHYYDSRSFDYW

SEQ ID NO: 2537 - protein, 14 aa, synthetic construct
CARDFQGTGPFDYW

SEQ ID NO: 2538 - protein, 16 aa, synthetic construct
CARGRLYSGSFSFDYW

SEQ ID NO: 2539 - protein, 15 aa, synthetic construct
CARDGGYNWNFFDYW

SEQ ID NO: 2540 - protein, 14 aa, synthetic construct
CTHRDAAMVYFDYW

SEQ ID NO: 2541 - protein, 15 aa, synthetic construct [sequence omitted]

SEQ ID NO: 2542 - protein, 16 aa, synthetic construct
CARGWNYGSGSCFDNW

SEQ ID NO: 2543 - protein, 16 aa, synthetic construct
CARGFSGTYYGDFDYW

SEQ ID NO: 2544 - protein, 15 aa, synthetic construct
CAREGEWEPLHMDVW

SEQ ID NO: 2545 - protein, 15 aa, synthetic construct
CAKSLSGSYVYMDVW

SEQ ID NO: 2546 - protein, 15 aa, synthetic construct
CAKGFLEWLLGFDYW

SEQ ID NO: 2547 - protein, 15 aa, synthetic construct
CARDGGSSGYYSDYW

SEQ ID NO: 2548 - protein, 15 aa, synthetic construct
CTRDLVYSSGWYDYW

SEQ ID NO: 2549 - protein, 15 aa, synthetic construct
CAREGIKASDAFDIW

SEQ ID NO: 2550 - protein, 15 aa, synthetic construct
CAKDIDPSITGTDYW

SEQ ID NO: 2551 - protein, 15 aa, synthetic construct
CAGLRHFDWLGFDSW

SEQ ID NO: 2552 - protein, 15 aa, synthetic construct
CAKEDNWNYGWFDPW

SEQ ID NO: 2553 - protein, 16 aa, synthetic construct
CAREETGTTSWYFDLW

SEQ ID NO: 2554 - protein, 15 aa, synthetic construct [sequence omitted]

SEQ ID NO: 2555 - protein, 16 aa, synthetic construct
CATPYCSGGSCHFDYW

SEQ ID NO: 2556 - protein, 16 aa, synthetic construct
CARDDYGGNSVYFDYW

SEQ ID NO: 2557 - protein, 16 aa, synthetic construct
CVRAARYSGTYIFDYW

SEQ ID NO: 2558 - protein, 14 aa, synthetic construct
CTTDPGYSYGVDYW

SEQ ID NO: 2559 - protein, 16 aa, synthetic construct
CARPEYSSSSGYFQHW

SEQ ID NO: 2560 - protein, 16 aa, synthetic construct
CAREYNWNYEDAFDIW

SEQ ID NO: 2561 - protein, 15 aa, synthetic construct
CAHRRGSYSNWFDPW

SEQ ID NO: 2562 - protein, 16 aa, synthetic construct
CARTLFGVVKNWFDPW

SEQ ID NO: 2563 - protein, 16 aa, synthetic construct
CAREVLGGGDCPFDYW

SEQ ID NO: 2564 - protein, 16 aa, synthetic construct
CARSDGGSHYVFFDDW

SEQ ID NO: 2565 - protein, 16 aa, synthetic construct
CAKDIAYSSSGHFDYW

SEQ ID NO: 2566 - protein, 16 aa, synthetic construct
CARAPLTGTTNWFDPW

SEQ ID NO: 2567 - protein, 17 aa, synthetic construct
CAGVLYYDSSGYPFDYW

SEQ ID NO: 2568 - protein, 17 aa, synthetic construct
CARDPLAARPVGWFDPW

SEQ ID NO: 2569 - protein, 17 aa, synthetic construct
CAREDGYSSGWNYFDYW

SEQ ID NO: 2570 - protein, 17 aa, synthetic construct
CATGGQTIVAARVFDYW

SEQ ID NO: 2571 - protein, 17 aa, synthetic construct
CARDQTPSDHYYYMDVW

SEQ ID NO: 2572 - protein, 17 aa, synthetic construct
CARDRGITMRLDNMDVW

SEQ ID NO: 2573 - protein, 15 aa, synthetic construct
CTRRYNWNDVGFDYW

SEQ ID NO: 2574 - protein, 17 aa, synthetic construct
CAHRPGITGNTGYFDYW

SEQ ID NO: 2575 - protein, 18 aa, synthetic construct
CARCRYSGSLTSYYMDVW

SEQ ID NO: 2576 - protein, 18 aa, synthetic construct
CAKDMITGTTNYYYMDVW

SEQ ID NO: 2577 - protein, 18 aa, synthetic construct
CAKGGYDFWSGYYPFDPW

SEQ ID NO: 2578 - protein, 16 aa, synthetic construct
CTTEGTTVTTWAFDIW

SEQ ID NO: 2579 - protein, 14 aa, synthetic construct
CASSGSYSDAFDIW

SEQ ID NO: 2580 - protein, 18 aa, synthetic construct
CAKDRTGYYHYYYFMDVW

SEQ ID NO: 2581 - protein, 18 aa, synthetic construct
CARSGYNWKYDYYYMDVW

SEQ ID NO: 2582 - protein, 19 aa, synthetic construct
CAREGGYDFWSGLNWFDPW

SEQ ID NO: 2583 - protein, 19 aa, synthetic construct
CARAGGIAAAGTGYWFDPW

SEQ ID NO: 2584 - protein, 17 aa, synthetic construct
CTTADYDFWSGYYMDVW

SEQ ID NO: 2585 - protein, 15 aa, synthetic construct
CARDLELRGGAFDIW

SEQ ID NO: 2586 - protein, 20 aa, synthetic construct
CTRGEGATWGNYHCYYMDVW

SEQ ID NO: 2587 - protein, 20 aa, synthetic construct
CARDQITMVRGFLGDWFDPW

SEQ ID NO: 2588 - protein, 12 aa, synthetic construct [sequence omitted]

SEQ ID NO: 2589 - protein, 16 aa, synthetic construct
CAREEIVGATTAFDIW

SEQ ID NO: 2590 - protein, 16 aa, synthetic construct
CARDYGGNSGWYFDLW

SEQ ID NO: 2591 - protein, 14 aa, synthetic construct
CAREGLTGHVFDIW

SEQ ID NO: 2592 - protein, 16 aa, synthetic construct
CARGGGSGSYDWFDPW

SEQ ID NO: 2593 - protein, 21 aa, synthetic construct
CAREGVLCSGGSCYREIFDYW

SEQ ID NO: 2594 - protein, 20 aa, synthetic construct
CSTSPYYDFWSGYYGYIDYW

SEQ ID NO: 2595 - protein, 20 aa, synthetic construct
CSTSPYFDFWSGYYGYLDYW

SEQ ID NO: 2596 - protein, 14 aa, synthetic construct
CARHAAAGGWFDPW

SEQ ID NO: 2597 - protein, 15 aa, synthetic construct
CARRSSSGIGAFDIW

SEQ ID NO: 2598 - protein, 17 aa, synthetic construct
CARGRGIAARPPYFDYW

SEQ ID NO: 2599 - protein, 16 aa, synthetic construct
CASEYSSSSLDAFDIW

SEQ ID NO: 2600 - protein, 19 aa, synthetic construct
CARGTTVVTPTEYYYMDVW

SEQ ID NO: 2601 - protein, 26 aa, synthetic construct
CARRGDFWSGYYSTSQNIVIHWFDSW

SEQ ID NO: 2602 - protein, 14 aa, synthetic construct
TGTSSDVGGYNYVS

SEQ ID NO: 2603 - protein, 11 aa, synthetic construct
SGDALPKKYAY

SEQ ID NO: 2604 - protein, 14 aa, synthetic construct
TGSSSNIGAGYDVH

SEQ ID NO: 2605 - protein, 11 aa, synthetic construct
SGDVLAKKYAR

SEQ ID NO: 2606 - protein, 11 aa, synthetic construct
SGDALPKKYAY

SEQ ID NO: 2607 - protein, 14 aa, synthetic construct
TGSSSNIGAGYDVH

SEQ ID NO: 2608 - protein, 14 aa, synthetic construct
TGTSSDVGGYNYVS

SEQ ID NO: 2609 - protein, 14 aa, synthetic construct
TGTSSDVGGYNYVS

SEQ ID NO: 2610 - protein, 11 aa, synthetic construct
QGDSLRSYYAS

SEQ ID NO: 2611 - protein, 11 aa, synthetic construct
GGNNIGSKSVH

SEQ ID NO: 2612 - protein, 13 aa, synthetic construct
SGSSSNIGSNTVN

SEQ ID NO: 2613 - protein, 14 aa, synthetic construct
TGTSSDVGGYNYVS

SEQ ID NO: 2614 - protein, 13 aa, synthetic construct
SGSSSNIGNNAVN

SEQ ID NO: 2615 - protein, 11 aa, synthetic construct
GGNNIGSKNVH

SEQ ID NO: 2616 - protein, 11 aa, synthetic construct
SGDALPKKYAY

SEQ ID NO: 2617 - protein, 14 aa, synthetic construct
TGTSSDVGGYNYVS

SEQ ID NO: 2618 - protein, 11 aa, synthetic construct
SGDKLGDKYAC

SEQ ID NO: 2619 - protein, 11 aa, synthetic construct
SADALPNQYAY

SEQ ID NO: 2620 - protein, 11 aa, synthetic construct
SGDALPKKYAY

SEQ ID NO: 2621 - protein, 11 aa, synthetic construct
SGDALPKKYAY

SEQ ID NO: 2622 - protein, 11 aa, synthetic construct
SGDALPKKYAY

SEQ ID NO: 2623 - protein, 11 aa, synthetic construct
SGDALPKKYAY

SEQ ID NO: 2624 - protein, 14 aa, synthetic construct
TGTSSDVGGYNYVS

SEQ ID NO: 2625 - protein, 14 aa, synthetic construct
TGTSSDVGGYNYVS

SEQ ID NO: 2626 - protein, 14 aa, synthetic construct
TGTSSDVGGYNYVS

SEQ ID NO: 2627 - protein, 11 aa, synthetic construct
SGDVLAKKYAR

SEQ ID NO: 2628 - protein, 11 aa, synthetic construct
SADALPKQYAY

SEQ ID NO: 2629 - protein, 11 aa, synthetic construct
SGDALPKKYAY

SEQ ID NO: 2630 - protein, 11 aa, synthetic construct
SGDALPKKYAY

SEQ ID NO: 2631 - protein, 11 aa, synthetic construct
SGDALPKKYAY

SEQ ID NO: 2632 - protein, 11 aa, synthetic construct
SGDALPKKYAY

SEQ ID NO: 2633 - protein, 11 aa, synthetic construct
SGDALPKKYAY

SEQ ID NO: 2634 - protein, 11 aa, synthetic construct
GGNNIGSKNVH

SEQ ID NO: 2635 - protein, 11 aa, synthetic construct
QGDSLRSYYAS

SEQ ID NO: 2636 - protein, 14 aa, synthetic construct
ASSTGAVTSGYYPN

SEQ ID NO: 2637 - protein, 13 aa, synthetic construct
SGSSSNIGSNTVN

SEQ ID NO: 2638 - protein, 11 aa, synthetic construct
SGDKLGDKYAC

SEQ ID NO: 2639 - protein, 11 aa, synthetic construct
SGDKLGDKYAC

SEQ ID NO: 2640 - protein, 11 aa, synthetic construct
SGDKLGDKYAC

SEQ ID NO: 2641 - protein, 11 aa, synthetic construct
SGDALPKKYAY

SEQ ID NO: 2642 - protein, 11 aa, synthetic construct
SGDALPKKYAY

SEQ ID NO: 2643 - protein, 11 aa, synthetic construct
SGDALPKKYAY

SEQ ID NO: 2644 - protein, 11 aa, synthetic construct
SGDALPKKYAY

SEQ ID NO: 2645 - protein, 11 aa, synthetic construct
SGDALPKKYAY

SEQ ID NO: 2646 - protein, 11 aa, synthetic construct
SGDALPKKYAY

SEQ ID NO: 2647 - protein, 11 aa, synthetic construct
SGDALPKKYAY

SEQ ID NO: 2648 - protein, 11 aa, synthetic construct
QGDSLRSYYAS

SEQ ID NO: 2649 - protein, 11 aa, synthetic construct
QGDSLRSYYAS

SEQ ID NO: 2650 - protein, 11 aa, synthetic construct
SGDALPKKYAY

SEQ ID NO: 2651 - protein, 14 aa, synthetic construct
TGTSSDVGGYNYVS

SEQ ID NO: 2652 - protein, 14 aa, synthetic construct
TGTSSDVGGYNYVS

SEQ ID NO: 2653 - protein, 14 aa, synthetic construct
TGTSSDVGGYNYVS

SEQ ID NO: 2654 - protein, 14 aa, synthetic construct
TLRSGIYVGTYRIY

SEQ ID NO: 2655 - protein, 11 aa, synthetic construct
SGDKLGDKYAC

SEQ ID NO: 2656 - protein, 11 aa, synthetic construct
SGDKLGDKYAC

SEQ ID NO: 2657 - protein, 11 aa, synthetic construct
SGDVLAKKYAR

SEQ ID NO: 2658 - protein, 11 aa, synthetic construct
SGDVLAKKYAR

SEQ ID NO: 2659 - protein, 11 aa, synthetic construct
SGDALPKKYAY

SEQ ID NO: 2660 - protein, 11 aa, synthetic construct
SGDALPKKYAY

SEQ ID NO: 2661 - protein, 11 aa, synthetic construct
QGDSLRSYYAS

SEQ ID NO: 2662 - protein, 11 aa, synthetic construct
SGDALPKKYAY

SEQ ID NO: 2663 - protein, 11 aa, synthetic construct
SGDALPKKYAY

SEQ ID NO: 2664 - protein, 14 aa, synthetic construct
ASSTGAVTSGYYPN

SEQ ID NO: 2665 - protein, 14 aa, synthetic construct
TGTSSDVGGYNYVS

SEQ ID NO: 2666 - protein, 14 aa, synthetic construct
TGSSSNIGAGYDVH

SEQ ID NO: 2667 - protein, 11 aa, synthetic construct
QGDSLRNYYAS

SEQ ID NO: 2668 - protein, 11 aa, synthetic construct
QGDSLRSYYAS

SEQ ID NO: 2669 - protein, 11 aa, synthetic construct
QGDSLRSYYAS

SEQ ID NO: 2670 - protein, 11 aa, synthetic construct
SGDALPKKYAY

SEQ ID NO: 2671 - protein, 11 aa, synthetic construct
QGDNLRNYSVS

SEQ ID NO: 2672 - protein, 11 aa, synthetic construct
SGDALPKKYAY

SEQ ID NO: 2673 - protein, 11 aa, synthetic construct
SGDALPKKYAY

SEQ ID NO: 2674 - protein, 11 aa, synthetic construct
SGDALPKKYAY

SEQ ID NO: 2675 - protein, 11 aa, synthetic construct
QGDSLRSYYAS

SEQ ID NO: 2676 - protein, 11 aa, synthetic construct
GGNNIGSKSVH

SEQ ID NO: 2677 - protein, 11 aa, synthetic construct
QGDSLRSYYAN

SEQ ID NO: 2678 - protein, 11 aa, synthetic construct
QGDSLRTYYAS

SEQ ID NO: 2679 - protein, 11 aa, synthetic construct
SGDALPKKYAY

SEQ ID NO: 2680 - protein, 14 aa, synthetic construct
ASSTGAVTSGYYPN

SEQ ID NO: 2681 - protein, 14 aa, synthetic construct
TGTSSDVGGYNYVS

SEQ ID NO: 2682 - protein, 14 aa, synthetic construct
TGTSSDVGGYNYVS

SEQ ID NO: 2683 - protein, 14 aa, synthetic construct
TGTSSDVGGYNYVS

SEQ ID NO: 2684 - protein, 11 aa, synthetic construct
SGDKLGDKYAC

SEQ ID NO: 2685 - protein, 11 aa, synthetic construct
SGDALPKKYAY

SEQ ID NO: 2686 - protein, 11 aa, synthetic construct
GGNNIGSKSVH

SEQ ID NO: 2687 - protein, 11 aa, synthetic construct
SGDALPKKYAY

SEQ ID NO: 2688 - protein, 11 aa, synthetic construct
SGDALPKKYAY

SEQ ID NO: 2689 - protein, 14 aa, synthetic construct
ASSTGAVTSGYYPN

SEQ ID NO: 2690 - protein, 14 aa, synthetic construct
TGTSSDVGGYNYVS

SEQ ID NO: 2691 - protein, 13 aa, synthetic construct
SGSSSNIGNNAVN

SEQ ID NO: 2692 - protein, 13 aa, synthetic construct
SGSSSNIGSNTVN

SEQ ID NO: 2693 - protein, 13 aa, synthetic construct
SGSISNIGNNAVS

SEQ ID NO: 2694 - protein, 14 aa, synthetic construct
TGTSSDVGGYNYVS

SEQ ID NO: 2695 - protein, 14 aa, synthetic construct
SGSSSNIGAGYDVH

SEQ ID NO: 2696 - protein, 11 aa, synthetic construct
SGDVLAKKYAR

SEQ ID NO: 2697 - protein, 11 aa, synthetic construct
SGDKLGDKYAC

SEQ ID NO: 2698 - protein, 11 aa, synthetic construct
QGDSLRSYYAS

SEQ ID NO: 2699 - protein, 11 aa, synthetic construct
GGNNIGSKSVH

SEQ ID NO: 2700 - protein, 11 aa, synthetic construct
QGDSLRSYYAS

SEQ ID NO: 2701 - protein, 11 aa, synthetic construct
QGDSLRSYYAS

SEQ ID NO: 2702 - protein, 14 aa, synthetic construct
TGTSSDVGAYNYVS

SEQ ID NO: 2703 - protein, 11 aa, synthetic construct
SGDKLGDKYAC

SEQ ID NO: 2704 - protein, 11 aa, synthetic construct
SGDKLGDKYAC

SEQ ID NO: 2705 - protein, 11 aa, synthetic construct
SGDKLGDKYAC

SEQ ID NO: 2706 - protein, 11 aa, synthetic construct
GENNIVNKNVH

SEQ ID NO: 2707 - protein, 11 aa, synthetic construct
SGDALPKKYAY

SEQ ID NO: 2708 - protein, 11 aa, synthetic construct
SGDALPKKYAY

SEQ ID NO: 2709 - protein, 13 aa, synthetic construct
SGSSSNIERTAVN

SEQ ID NO: 2710 - protein, 14 aa, synthetic construct
TGNSSNIGADYDVQ

SEQ ID NO: 2711 - protein, 11 aa, synthetic construct
SGDALPKKYAY

SEQ ID NO: 2712 - protein, 11 aa, synthetic construct
SGDALPKKYAY

SEQ ID NO: 2713 - protein, 11 aa, synthetic construct
QGDSLRSYYAS

SEQ ID NO: 2714 - protein, 11 aa, synthetic construct
SGDALPKKYAY

SEQ ID NO: 2715 - protein, 11 aa, synthetic construct
SGDALPKKYAY

SEQ ID NO: 2716 - protein, 11 aa, synthetic construct
QGDSLRSYYAS

SEQ ID NO: 2717 - protein, 11 aa, synthetic construct
SGDALPKKYAY

SEQ ID NO: 2718 - protein, 11 aa, synthetic construct
GGNNIGSKSVH

SEQ ID NO: 2719 - protein, 11 aa, synthetic construct
SGDALPKKYAY

SEQ ID NO: 2720 - protein, 14 aa, synthetic construct
TGTSSDVGVYNYVS

SEQ ID NO: 2721 - protein, 14 aa, synthetic construct
TGTSSDVGGYNYVS

SEQ ID NO: 2722 - protein, 11 aa, synthetic construct
QGDSLRSYYAS

SEQ ID NO: 2723 - protein, 14 aa, synthetic construct
TGSSSNIGAGYAVH

SEQ ID NO: 2724 - protein, 14 aa, synthetic construct
SCSGSSSNIGAGYA

SEQ ID NO: 2725 - protein, 14 aa, synthetic construct
TLRSGINVGTYRIY

SEQ ID NO: 2726 - protein, 11 aa, synthetic construct
SGDKLGDKYAC

SEQ ID NO: 2727 - protein, 11 aa, synthetic construct
GGNNIGSKSVH

SEQ ID NO: 2728 - protein, 11 aa, synthetic construct
SGDALPKKYAY

SEQ ID NO: 2729 - protein, 11 aa, synthetic construct
SGDKLGDKYAC

SEQ ID NO: 2730 - protein, 14 aa, synthetic construct
TGSSSNIGAGYDVH

SEQ ID NO: 2731 - protein, 7 aa, synthetic construct
EVSNRPS

SEQ ID NO: 2732 - protein, 7 aa, synthetic construct
EDSKRPS

SEQ ID NO: 2733 - protein, 7 aa, synthetic construct
GNSNRPS

SEQ ID NO: 2734 - protein, 7 aa, synthetic construct
KDSERPS

SEQ ID NO: 2735 - protein, 7 aa, synthetic construct
EDSKRPS

SEQ ID NO: 2736 - protein, 7 aa, synthetic construct
GNSNRPS

SEQ ID NO: 2737 - protein, 7 aa, synthetic construct
EVSKRPS

SEQ ID NO: 2738 - protein, 7 aa, synthetic construct
DVSKRPS

SEQ ID NO: 2739 - protein, 7 aa, synthetic construct
GKNNRPS

SEQ ID NO: 2740 - protein, 7 aa, synthetic construct
YDSDRPS

SEQ ID NO: 2741 - protein, 7 aa, synthetic construct
SNNQRPS

SEQ ID NO: 2742 - protein, 7 aa, synthetic construct
EVSKRPS

SEQ ID NO: 2743 - protein, 7 aa, synthetic construct
YDDLLPS

SEQ ID NO: 2744 - protein, 7 aa, synthetic construct
RDSNRPS

SEQ ID NO: 2745 - protein, 7 aa, synthetic construct
EDSKRPS

SEQ ID NO: 2746 - protein, 7 aa, synthetic construct
EVIKRPS

SEQ ID NO: 2747 - protein, 7 aa, synthetic construct
QDSKRPS

SEQ ID NO: 2748 - protein, 7 aa, synthetic construct
KDSERPS

SEQ ID NO: 2749 - protein, 7 aa, synthetic construct
EDSKRPS

SEQ ID NO: 2750 - protein, 7 aa, synthetic construct
EDSKRPS

SEQ ID NO: 2751 - protein, 7 aa, synthetic construct
EDSKRPS

SEQ ID NO: 2752 - protein, 7 aa, synthetic construct
EDSKRPS

SEQ ID NO: 2753 - protein, 7 aa, synthetic construct
EVSDRPS

SEQ ID NO: 2754 - protein, 7 aa, synthetic construct
EVSNRPS

SEQ ID NO: 2755 - protein, 7 aa, synthetic construct
DVSKRPS

SEQ ID NO: 2756 - protein, 7 aa, synthetic construct
KDSERPS

SEQ ID NO: 2757 - protein, 7 aa, synthetic construct
KDSERPS

SEQ ID NO: 2758 - protein, 7 aa, synthetic construct
EDSKRPS

SEQ ID NO: 2759 - protein, 7 aa, synthetic construct
EDSKRPS

SEQ ID NO: 2760 - protein, 7 aa, synthetic construct
EDSKRPS

SEQ ID NO: 2761 - protein, 7 aa, synthetic construct
EDSKRPS

SEQ ID NO: 2762 - protein, 7 aa, synthetic construct
EDSKRPS

SEQ ID NO: 2763 - protein, 7 aa, synthetic construct
RDSNRPS

SEQ ID NO: 2764 - protein, 7 aa, synthetic construct
GKNNRPS

SEQ ID NO: 2765 - protein, 7 aa, synthetic construct
STSNKHS

SEQ ID NO: 2766 - protein, 7 aa, synthetic construct
SNNQRPS

SEQ ID NO: 2767 - protein, 7 aa, synthetic construct
QDSKRPS

SEQ ID NO: 2768 - protein, 7 aa, synthetic construct
QDSKRPS

SEQ ID NO: 2769 - protein, 7 aa, synthetic construct
QDSKRPS

SEQ ID NO: 2770 - protein, 7 aa, synthetic construct
EDSKRPS

SEQ ID NO: 2771 - protein, 7 aa, synthetic construct
EDSKRPS

SEQ ID NO: 2772 - protein, 7 aa, synthetic construct
EDSKRPS

SEQ ID NO: 2773 - protein, 7 aa, synthetic construct
EDSKRPS

SEQ ID NO: 2774 - protein, 7 aa, synthetic construct
EDSKRPS

SEQ ID NO: 2775 - protein, 7 aa, synthetic construct
EDSKRPS

SEQ ID NO: 2776 - protein, 7 aa, synthetic construct
EDSKRPS

SEQ ID NO: 2777 - protein, 7 aa, synthetic construct
GKNNRPS

SEQ ID NO: 2778 - protein, 7 aa, synthetic construct
GKNNRPS

SEQ ID NO: 2779 - protein, 7 aa, synthetic construct
EDSKRPS

SEQ ID NO: 2780 - protein, 7 aa, synthetic construct
DVSNRPS

SEQ ID NO: 2781 - protein, 7 aa, synthetic construct
EVSNRPS

SEQ ID NO: 2782 - protein, 7 aa, synthetic construct
EVSNRPS

SEQ ID NO: 2783 - protein, 11 aa, synthetic construct
YKSDSDKQQGS

SEQ ID NO: 2784 - protein, 7 aa, synthetic construct
QDSKRPS

SEQ ID NO: 2785 - protein, 7 aa, synthetic construct
QDSKRPS

SEQ ID NO: 2786 - protein, 7 aa, synthetic construct
KDSERPS

SEQ ID NO: 2787 - protein, 7 aa, synthetic construct
KDSERPS

SEQ ID NO: 2788 - protein, 7 aa, synthetic construct
EDSKRPS

SEQ ID NO: 2789 - protein, 7 aa, synthetic construct
EDSKRPS

SEQ ID NO: 2790 - protein, 7 aa, synthetic construct
GKNNRPS

SEQ ID NO: 2791 - protein, 7 aa, synthetic construct
EDSKRPS

SEQ ID NO: 2792 - protein, 7 aa, synthetic construct
EDSKRPS

SEQ ID NO: 2793 - protein, 7 aa, synthetic construct
STSNKHS

SEQ ID NO: 2794 - protein, 7 aa, synthetic construct
EVSKRPS

SEQ ID NO: 2795 - protein, 7 aa, synthetic construct
DNNNRPS

SEQ ID NO: 2796 - protein, 7 aa, synthetic construct
GKNNRPS

SEQ ID NO: 2797 - protein, 7 aa, synthetic construct
GKNNRPS

SEQ ID NO: 2798 - protein, 7 aa, synthetic construct
GKNNRPS

SEQ ID NO: 2799 - protein, 7 aa, synthetic construct
EDSKRPS

SEQ ID NO: 2800 - protein, 7 aa, synthetic construct
GKNNRPS

SEQ ID NO: 2801 - protein, 7 aa, synthetic construct
EDSKRPS

SEQ ID NO: 2802 - protein, 7 aa, synthetic construct
EDSKRPS

SEQ ID NO: 2803 - protein, 7 aa, synthetic construct
EDSKRPS

SEQ ID NO: 2804 - protein, 7 aa, synthetic construct
GKNNRPS

SEQ ID NO: 2805 - protein, 7 aa, synthetic construct
YDSDRPS

SEQ ID NO: 2806 - protein, 7 aa, synthetic construct
GKNNRPS

SEQ ID NO: 2807 - protein, 7 aa, synthetic construct
GKNNRPS

SEQ ID NO: 2808 - protein, 7 aa, synthetic construct
EDSKRPS

SEQ ID NO: 2809 - protein, 7 aa, synthetic construct
STSNKHS

SEQ ID NO: 2810 - protein, 7 aa, synthetic construct
EVIIRPS

SEQ ID NO: 2811 - protein, 7 aa, synthetic construct
EVSNRPS

SEQ ID NO: 2812 - protein, 7 aa, synthetic construct
EVSNRPS

SEQ ID NO: 2813 - protein, 7 aa, synthetic construct
QDSKRPS

SEQ ID NO: 2814 - protein, 7 aa, synthetic construct
EDSKRPS

SEQ ID NO: 2815 - protein, 7 aa, synthetic construct
YDSDRPS

SEQ ID NO: 2816 - protein, 7 aa, synthetic construct
EDSKRPS

SEQ ID NO: 2817 - protein, 7 aa, synthetic construct
EDSKRPS

SEQ ID NO: 2818 - protein, 7 aa, synthetic construct
STSNKHS

SEQ ID NO: 2819 - protein, 7 aa, synthetic construct
DVSKRPS

SEQ ID NO: 2820 - protein, 7 aa, synthetic construct
HDVLLSS

SEQ ID NO: 2821 - protein, 7 aa, synthetic construct
SNNQRPS

SEQ ID NO: 2822 - protein, 7 aa, synthetic construct
YDDLLPS

SEQ ID NO: 2823 - protein, 7 aa, synthetic construct
EVSKRPS

SEQ ID NO: 2824 - protein, 7 aa, synthetic construct
GNRNRPS

SEQ ID NO: 2825 - protein, 7 aa, synthetic construct
KDSERPS

SEQ ID NO: 2826 - protein, 7 aa, synthetic construct
QDSKRPS

SEQ ID NO: 2827 - protein, 7 aa, synthetic construct
GKNNRPS

SEQ ID NO: 2828 - protein, 7 aa, synthetic construct
YDSDRPS

SEQ ID NO: 2829 - protein, 7 aa, synthetic construct
GKNNRPS

SEQ ID NO: 2830 - protein, 7 aa, synthetic construct
GKNNRPS

SEQ ID NO: 2831 - protein, 7 aa, synthetic construct
DVSKRPS

SEQ ID NO: 2832 - protein, 7 aa, synthetic construct
QDSKRPS

SEQ ID NO: 2833 - protein, 7 aa, synthetic construct
QDSKRPS

SEQ ID NO: 2834 - protein, 7 aa, synthetic construct
QDSKRPS

SEQ ID NO: 2835 - protein, 7 aa, synthetic construct
RDGNRPS

SEQ ID NO: 2836 - protein, 7 aa, synthetic construct
EDSKRPS

SEQ ID NO: 2837 - protein, 7 aa, synthetic construct
EDSKRPS

SEQ ID NO: 2838 - protein, 7 aa, synthetic construct
SNDQRPL

SEQ ID NO: 2839 - protein, 7 aa, synthetic construct
ANIIRPS

SEQ ID NO: 2840 - protein, 7 aa, synthetic construct
EDSKRPS

SEQ ID NO: 2841 - protein, 7 aa, synthetic construct
EDSKRPS

SEQ ID NO: 2842 - protein, 7 aa, synthetic construct
GKNNRPS

SEQ ID NO: 2843 - protein, 7 aa, synthetic construct
EDSKRPS

SEQ ID NO: 2844 - protein, 7 aa, synthetic construct
EDSKRPS

SEQ ID NO: 2845 - protein, 7 aa, synthetic construct
GKNNRPS

SEQ ID NO: 2846 - protein, 7 aa, synthetic construct
EDSKRPS

SEQ ID NO: 2847 - protein, 7 aa, synthetic construct
YDSDRPS

SEQ ID NO: 2848 - protein, 7 aa, synthetic construct
EDSKRPS

SEQ ID NO: 2849 - protein, 7 aa, synthetic construct
EVSNRPS

SEQ ID NO: 2850 - protein, 7 aa, synthetic construct
EVSNRPS

SEQ ID NO: 2851 - protein, 7 aa, synthetic construct
GKNNRPS

SEQ ID NO: 2852 - protein, 7 aa, synthetic construct
GNINRPS

SEQ ID NO: 2853 - protein, 7 aa, synthetic construct
IYGNLNR

SEQ ID NO: 2854 - protein, 11 aa, synthetic construct
YKSDSDKQQGS

SEQ ID NO: 2855 - protein, 7 aa, synthetic construct
QDSKRPS

SEQ ID NO: 2856 - protein, 7 aa, synthetic construct
YDSDRPS

SEQ ID NO: 2857 - protein, 7 aa, synthetic construct
EDSKRPS

SEQ ID NO: 2858 - protein, 7 aa, synthetic construct
QDSKRPS

SEQ ID NO: 2859 - protein, 7 aa, synthetic construct
GNSNRPS

SEQ ID NO: 2860 - protein, 12 aa, synthetic construct [sequence omitted]

SEQ ID NO: 2861 - protein, 13 aa, synthetic construct [sequence omitted]

SEQ ID NO: 2862 - protein, 13 aa, synthetic construct [sequence omitted]

SEQ ID NO: 2863 - protein, 11 aa, synthetic construct [sequence omitted]

SEQ ID NO: 2864 - protein, 12 aa, synthetic construct [sequence omitted]

SEQ ID NO: 2865 - protein, 13 aa, synthetic construct [sequence omitted]

SEQ ID NO: 2866 - protein, 12 aa, synthetic construct [sequence omitted]

SEQ ID NO: 2867 - protein, 12 aa, synthetic construct [sequence omitted]

SEQ ID NO: 2868 - protein, 13 aa, synthetic construct [sequence omitted]

SEQ ID NO: 2869 - protein, 13 aa, synthetic construct [sequence omitted]

SEQ ID NO: 2870 - protein, 13 aa, synthetic construct [sequence omitted]

SEQ ID NO: 2871 - protein, 12 aa, synthetic construct [sequence omitted]

SEQ ID NO: 2872 - protein, 13 aa, synthetic construct [sequence omitted]

SEQ ID NO: 2873 - protein, 11 aa, synthetic construct [sequence omitted]

SEQ ID NO: 2874 - protein, 13 aa, synthetic construct [sequence omitted]

SEQ ID NO: 2875 - protein, 12 aa, synthetic construct
CSAYAGSNNVVF

SEQ ID NO: 2876 - protein, 11 aa, synthetic construct [sequence omitted]

SEQ ID NO: 2877 - protein, 12 aa, synthetic construct [sequence omitted]

SEQ ID NO: 2878 - protein, 13 aa, synthetic construct [sequence omitted]

SEQ ID NO: 2879 - protein, 13 aa, synthetic construct [sequence omitted]

SEQ ID NO: 2880 - protein, 13 aa, synthetic construct [sequence omitted]

SEQ ID NO: 2881 - protein, 13 aa, synthetic construct [sequence omitted]

SEQ ID NO: 2882 - protein, 12 aa, synthetic construct
CSSYTRSSTCVF

SEQ ID NO: 2883 - protein, 12 aa, synthetic construct [sequence omitted]

SEQ ID NO: 2884 - protein, 13 aa, synthetic construct [sequence omitted]

SEQ ID NO: 2885 - protein, 11 aa, synthetic construct [sequence omitted]

SEQ ID NO: 2886 - protein, 12 aa, synthetic construct [sequence omitted]

SEQ ID NO: 2887 - protein, 13 aa, synthetic construct [sequence omitted]

SEQ ID NO: 2888 - protein, 13 aa, synthetic construct [sequence omitted]

SEQ ID NO: 2889 - protein, 13 aa, synthetic construct [sequence omitted]

SEQ ID NO: 2890 - protein, 13 aa, synthetic construct [sequence omitted]

SEQ ID NO: 2891 - protein, 13 aa, synthetic construct [sequence omitted]

SEQ ID NO: 2892 - protein, 11 aa, synthetic construct [sequence omitted]

SEQ ID NO: 2893 - protein, 13 aa, synthetic construct [sequence omitted]

SEQ ID NO: 2894 - protein, 11 aa, synthetic construct [sequence omitted]

SEQ ID NO: 2895 - protein, 13 aa, synthetic construct [sequence omitted]

SEQ ID NO: 2896 - protein, 11 aa, synthetic construct [sequence omitted]

SEQ ID NO: 2897 - protein, 11 aa, synthetic construct [sequence omitted]

SEQ ID NO: 2898 - protein, 11 aa, synthetic construct [sequence omitted]

SEQ ID NO: 2899 - protein, 13 aa, synthetic construct [sequence omitted]

SEQ ID NO: 2900 - protein, 13 aa, synthetic construct [sequence omitted]

SEQ ID NO: 2901 - protein, 13 aa, synthetic construct [sequence omitted]

SEQ ID NO: 2902 - protein, 13 aa, synthetic construct [sequence omitted]

SEQ ID NO: 2903 - protein, 13 aa, synthetic construct [sequence omitted]

SEQ ID NO: 2904 - protein, 13 aa, synthetic construct [sequence omitted]

SEQ ID NO: 2905 - protein, 13 aa, synthetic construct [sequence omitted]

SEQ ID NO: 2906 - protein, 13 aa, synthetic construct [sequence omitted]

SEQ ID NO: 2907 - protein, 13 aa, synthetic construct [sequence omitted]

SEQ ID NO: 2908 - protein, 13 aa, synthetic construct [sequence omitted]

SEQ ID NO: 2909 - protein, 12 aa, synthetic construct [sequence omitted]

SEQ ID NO: 2910 - protein, 12 aa, synthetic construct
CNSYTTNTTRVF

SEQ ID NO: 2911 - protein, 12 aa, synthetic construct [sequence omitted]

SEQ ID NO: 2912 - protein, 11 aa, synthetic construct [sequence omitted]

SEQ ID NO: 2913 - protein, 10 aa, synthetic construct [sequence omitted]

SEQ ID NO: 2914 - protein, 11 aa, synthetic construct [sequence omitted]

SEQ ID NO: 2915 - protein, 11 aa, synthetic construct [sequence omitted]

SEQ ID NO: 2916 - protein, 11 aa, synthetic construct [sequence omitted]

SEQ ID NO: 2917 - protein, 13 aa, synthetic construct [sequence omitted]

SEQ ID NO: 2918 - protein, 13 aa, synthetic construct [sequence omitted]

SEQ ID NO: 2919 - protein, 13 aa, synthetic construct [sequence omitted]

SEQ ID NO: 2920 - protein, 13 aa, synthetic construct [sequence omitted]

SEQ ID NO: 2921 - protein, 13 aa, synthetic construct [sequence omitted]

SEQ ID NO: 2922 - protein, 11 aa, synthetic construct [sequence omitted]

SEQ ID NO: 2923 - protein, 12 aa, synthetic construct [sequence omitted]

SEQ ID NO: 2924 - protein, 13 aa, synthetic construct
CQSYDGSLNGWVF

SEQ ID NO: 2925 - protein, 13 aa, synthetic construct
CKSRDRSGNHWVF

SEQ ID NO: 2926 - protein, 13 aa, synthetic construct [sequence omitted]

SEQ ID NO: 2927 - protein, 13 aa, synthetic construct [sequence omitted]

SEQ ID NO: 2928 - protein, 13 aa, synthetic construct [sequence omitted]

SEQ ID NO: 2929 - protein, 13 aa, synthetic construct
CNSRDISGKHWVF

SEQ ID NO: 2930 - protein, 13 aa, synthetic construct [sequence omitted]

SEQ ID NO: 2931 - protein, 13 aa, synthetic construct [sequence omitted]

SEQ ID NO: 2932 - protein, 13 aa, synthetic construct [sequence omitted]

SEQ ID NO: 2933 - protein, 13 aa, synthetic construct [sequence omitted]

SEQ ID NO: 2934 - protein, 13 aa, synthetic construct [sequence omitted]

SEQ ID NO: 2935 - protein, 13 aa, synthetic construct [sequence omitted]

SEQ ID NO: 2936 - protein, 13 aa, synthetic construct [sequence omitted]

SEQ ID NO: 2937 - protein, 14 aa, synthetic construct [sequence omitted]

SEQ ID NO: 2938 - protein, 11 aa, synthetic construct [sequence omitted]

SEQ ID NO: 2939 - protein, 12 aa, synthetic construct [sequence omitted]

SEQ ID NO: 2940 - protein, 13 aa, synthetic construct [sequence omitted]

SEQ ID NO: 2941 - protein, 13 aa, synthetic construct [sequence omitted]

SEQ ID NO: 2942 - protein, 11 aa, synthetic construct [sequence omitted]

SEQ ID NO: 2943 - protein, 13 aa, synthetic construct [sequence omitted]

SEQ ID NO: 2944 - protein, 13 aa, synthetic construct
CQVWDSSSYHYVF

SEQ ID NO: 2945 - protein, 13 aa, synthetic construct [sequence omitted]

SEQ ID NO: 2946 - protein, 13 aa, synthetic construct [sequence omitted]

SEQ ID NO: 2947 - protein, 11 aa, synthetic construct [sequence omitted]

SEQ ID NO: 2948 - protein, 12 aa, synthetic construct [sequence omitted]

SEQ ID NO: 2949 - protein, 13 aa, synthetic construct
CAAWDGRLNEWVF

SEQ ID NO: 2950 - protein, 13 aa, synthetic construct [sequence omitted]

SEQ ID NO: 2951 - protein, 13 aa, synthetic construct
CTAWDDRLNGPVF

SEQ ID NO: 2952 - protein, 12 aa, synthetic construct [sequence omitted]

SEQ ID NO: 2953 - protein, 13 aa, synthetic construct [sequence omitted]

SEQ ID NO: 2954 - protein, 11 aa, synthetic construct [sequence omitted]

SEQ ID NO: 2955 - protein, 11 aa, synthetic construct [sequence omitted]

SEQ ID NO: 2956 - protein, 13 aa, synthetic construct [sequence omitted]

SEQ ID NO: 2957 - protein, 13 aa, synthetic construct [sequence omitted]

SEQ ID NO: 2958 - protein, 13 aa, synthetic construct [sequence omitted]

SEQ ID NO: 2959 - protein, 13 aa, synthetic construct [sequence omitted]

SEQ ID NO: 2960 - protein, 12 aa, synthetic construct [sequence omitted]

SEQ ID NO: 2961 - protein, 11 aa, synthetic construct [sequence omitted]

SEQ ID NO: 2962 - protein, 11 aa, synthetic construct [sequence omitted]

SEQ ID NO: 2963 - protein, 11 aa, synthetic construct [sequence omitted]

SEQ ID NO: 2964 - protein, 12 aa, synthetic construct
CQVWDNNTPWVF

SEQ ID NO: 2965 - protein, 13 aa, synthetic construct [sequence omitted]

SEQ ID NO: 2966 - protein, 13 aa, synthetic construct [sequence omitted]

SEQ ID NO: 2967 - protein, 13 aa, synthetic construct [sequence omitted]

SEQ ID NO: 2968 - protein, 14 aa, synthetic construct [sequence omitted]

SEQ ID NO: 2969 - protein, 13 aa, synthetic construct [sequence omitted]

SEQ ID NO: 2970 - protein, 13 aa, synthetic construct [sequence omitted]

SEQ ID NO: 2971 - protein, 13 aa, synthetic construct [sequence omitted]

SEQ ID NO: 2972 - protein, 13 aa, synthetic construct [sequence omitted]

SEQ ID NO: 2973 - protein, 13 aa, synthetic construct [sequence omitted]

SEQ ID NO: 2974 - protein, 13 aa, synthetic construct [sequence omitted]

SEQ ID NO: 2975 - protein, 13 aa, synthetic construct [sequence omitted]

SEQ ID NO: 2976 - protein, 13 aa, synthetic construct [sequence omitted]

SEQ ID NO: 2977 - protein, 13 aa, synthetic construct [sequence omitted]

SEQ ID NO: 2978 - protein, 12 aa, synthetic construct [sequence omitted]

SEQ ID NO: 2979 - protein, 12 aa, synthetic construct [sequence omitted]

SEQ ID NO: 2980 - protein, 13 aa, synthetic construct [sequence omitted]

SEQ ID NO: 2981 - protein, 13 aa, synthetic construct
CQSFDSSLSGVMF

SEQ ID NO: 2982 - protein, 13 aa, synthetic construct [sequence omitted]

SEQ ID NO: 2983 - protein, 11 aa, synthetic construct [sequence omitted]

SEQ ID NO: 2984 - protein, 11 aa, synthetic construct [sequence omitted]

SEQ ID NO: 2985 - protein, 13 aa, synthetic construct [sequence omitted]

SEQ ID NO: 2986 - protein, 13 aa, synthetic construct [sequence omitted]

SEQ ID NO: 2987 - protein, 11 aa, synthetic construct [sequence omitted]

SEQ ID NO: 2988 - protein, 13 aa, synthetic construct [sequence omitted]

SEQ ID NO: 2989 - protein, 7 aa, synthetic construct
GYTFTSY

SEQ ID NO: 2990 - protein, 7 aa, synthetic construct
GGTFSSY

SEQ ID NO: 2991 - protein, 9 aa, synthetic construct
GGSISSSSY

SEQ ID NO: 2992 - protein, 7 aa, synthetic construct
GFTFSSY

SEQ ID NO: 2993 - protein, 7 aa, synthetic construct
GFTFSSY

SEQ ID NO: 2994 - protein, 7 aa, synthetic construct
GFTFSDY

SEQ ID NO: 2995 - protein, 7 aa, synthetic construct
GFTFSTD

SEQ ID NO: 2996 - protein, 7 aa, synthetic construct
GFTVSSN

SEQ ID NO: 2997 - protein, 9 aa, synthetic construct
GGSISSSSY

SEQ ID NO: 2998 - protein, 7 aa, synthetic construct
GYTFTSY

SEQ ID NO: 2999 - protein, 7 aa, synthetic construct
GFTFSSY

SEQ ID NO: 3000 - protein, 7 aa, synthetic construct
GYTFTSY

SEQ ID NO: 3001 - protein, 7 aa, synthetic construct
GFTFSSY

SEQ ID NO: 3002 - protein, 7 aa, synthetic construct
GFTFSSY

SEQ ID NO: 3003 - protein, 7 aa, synthetic construct
GFTFSSY

SEQ ID NO: 3004 - protein, 7 aa, synthetic construct
GYTFISY

SEQ ID NO: 3005 - protein, 7 aa, synthetic construct
GFTVSSN

SEQ ID NO: 3006 - protein, 7 aa, synthetic construct
GFTFSSY

SEQ ID NO: 3007 - protein, 7 aa, synthetic construct
GFTVSSN

SEQ ID NO: 3008 - protein, 9 aa, synthetic construct
GDSVSSNSA

SEQ ID NO: 3009 - protein, 7 aa, synthetic construct
GYSFSSY

SEQ ID NO: 3010 - protein, 7 aa, synthetic construct
GFTFSSY

SEQ ID NO: 3011 - protein, 7 aa, synthetic construct
GFTFSSY

SEQ ID NO: 3012 - protein, 7 aa, synthetic construct
GGSISSY

SEQ ID NO: 3013 - protein, 7 aa, synthetic construct
GFTFINA

SEQ ID NO: 3014 - protein, 7 aa, synthetic construct
GFTFSNA

SEQ ID NO: 3015 - protein, 7 aa, synthetic construct
GFTFSNA

SEQ ID NO: 3016 - protein, 7 aa, synthetic construct
GYTFTSY

SEQ ID NO: 3017 - protein, 7 aa, synthetic construct
GFTFSTY

SEQ ID NO: 3018 - protein, 7 aa, synthetic construct
GFTFSSY

SEQ ID NO: 3019 - protein, 7 aa, synthetic construct
GFTFSRY

SEQ ID NO: 3020 - protein, 7 aa, synthetic construct
GFTFSRC

SEQ ID NO: 3021 - protein, 7 aa, synthetic construct
GFTFINY

SEQ ID NO: 3022 - protein, 7 aa, synthetic construct
GFTFSSY

SEQ ID NO: 3023 - protein, 7 aa, synthetic construct
GFTFDDY

SEQ ID NO: 3024 - protein, 7 aa, synthetic construct
GYTFTSY

SEQ ID NO: 3025 - protein, 7 aa, synthetic construct
GYTFTSY

SEQ ID NO: 3026 - protein, 7 aa, synthetic construct
GFTFSSY

SEQ ID NO: 3027 - protein, 7 aa, synthetic construct
GFTFSSY

SEQ ID NO: 3028 - protein, 7 aa, synthetic construct
GFTFSSY

SEQ ID NO: 3029 - protein, 7 aa, synthetic construct
GFSFSSH

SEQ ID NO: 3030 - protein, 7 aa, synthetic construct
GFTFSSY

SEQ ID NO: 3031 - protein, 7 aa, synthetic construct
GYTFTSY

SEQ ID NO: 3032 - protein, 7 aa, synthetic construct
GFTFSSY

SEQ ID NO: 3033 - protein, 7 aa, synthetic construct
GYTFTSY

SEQ ID NO: 3034 - protein, 7 aa, synthetic construct
GYTFTNY

SEQ ID NO: 3035 - protein, 7 aa, synthetic construct
GFTFSSY

SEQ ID NO: 3036 - protein, 7 aa, synthetic construct
GFTFSSY

SEQ ID NO: 3037 - protein, 7 aa, synthetic construct
GYTFTSY

SEQ ID NO: 3038 - protein, 7 aa, synthetic construct
GYTFTSY

SEQ ID NO: 3039 - protein, 7 aa, synthetic construct
GFTFSNA

SEQ ID NO: 3040 - protein, 7 aa, synthetic construct
GFTFSNY

SEQ ID NO: 3041 - protein, 7 aa, synthetic construct
GFTFSSY

SEQ ID NO: 3042 - protein, 7 aa, synthetic construct
GFTFDDY

SEQ ID NO: 3043 - protein, 7 aa, synthetic construct
GFTFSSY

SEQ ID NO: 3044 - protein, 7 aa, synthetic construct
GFTFSSY

SEQ ID NO: 3045 - protein, 7 aa, synthetic construct
GFTFSSY

SEQ ID NO: 3046 - protein, 7 aa, synthetic construct
GFPFDDF

SEQ ID NO: 3047 - protein, 7 aa, synthetic construct
GFSISIN

SEQ ID NO: 3048 - protein, 7 aa, synthetic construct
GFTFSSY

SEQ ID NO: 3049 - protein, 7 aa, synthetic construct
GFTFSTY

SEQ ID NO: 3050 - protein, 7 aa, synthetic construct
GFTFSSY

SEQ ID NO: 3051 - protein, 7 aa, synthetic construct
GYTFTTY

SEQ ID NO: 3052 - protein, 7 aa, synthetic construct
GFTFSSY

SEQ ID NO: 3053 - protein, 7 aa, synthetic construct
GFTFNRY

SEQ ID NO: 3054 - protein, 8 aa, synthetic construct
GGSISSSN

SEQ ID NO: 3055 - protein, 7 aa, synthetic construct
GFTFSIY

SEQ ID NO: 3056 - protein, 7 aa, synthetic construct
GFTFSGY

SEQ ID NO: 3057 - protein, 7 aa, synthetic construct
GYTFTTY

SEQ ID NO: 3058 - protein, 7 aa, synthetic construct
GFTFSSY

SEQ ID NO: 3059 - protein, 7 aa, synthetic construct
GFTFSNA

SEQ ID NO: 3060 - protein, 7 aa, synthetic construct
GFTFSSY

SEQ ID NO: 3061 - protein, 7 aa, synthetic construct
GFTFSSY

SEQ ID NO: 3062 - protein, 7 aa, synthetic construct
GFTFSSY

SEQ ID NO: 3063 - protein, 7 aa, synthetic construct
GFTFSSY

SEQ ID NO: 3064 - protein, 7 aa, synthetic construct
GYTFTGY

SEQ ID NO: 3065 - protein, 7 aa, synthetic construct
GFTFSNA

SEQ ID NO: 3066 - protein, 7 aa, synthetic construct
GYTFTGY

SEQ ID NO: 3067 - protein, 7 aa, synthetic construct
GYTFTSY

SEQ ID NO: 3068 - protein, 7 aa, synthetic construct
GFTFSNA

SEQ ID NO: 3069 - protein, 7 aa, synthetic construct
GFTFSGY

SEQ ID NO: 3070 - protein, 7 aa, synthetic construct
GYTFTSY

SEQ ID NO: 3071 - protein, 7 aa, synthetic construct
GFTFSSY

SEQ ID NO: 3072 - protein, 7 aa, synthetic construct
GGSISDY

SEQ ID NO: 3073 - protein, 7 aa, synthetic construct
GFTFSSD

SEQ ID NO: 3074 - protein, 7 aa, synthetic construct
GFTFSSY

SEQ ID NO: 3075 - protein, 7 aa, synthetic construct
GFTFSSY

SEQ ID NO: 3076 - protein, 7 aa, synthetic construct
GYTFTSY

SEQ ID NO: 3077 - protein, 7 aa, synthetic construct
GYTFTDH

SEQ ID NO: 3078 - protein, 7 aa, synthetic construct
GYTFTGY

SEQ ID NO: 3079 - protein, 7 aa, synthetic construct
GFTFSSY

SEQ ID NO: 3080 - protein, 9 aa, synthetic construct
GDNVSSNSA

SEQ ID NO: 3081 - protein, 7 aa, synthetic construct
GYTFTSY

SEQ ID NO: 3082 - protein, 7 aa, synthetic construct
GYTFTGY

SEQ ID NO: 3083 - protein, 7 aa, synthetic construct
GFTFSRY

SEQ ID NO: 3084 - protein, 7 aa, synthetic construct
GFTFDEY

SEQ ID NO: 3085 - protein, 7 aa, synthetic construct
GFTFSSY

SEQ ID NO: 3086 - protein, 9 aa, synthetic construct
GFSISTSGV

SEQ ID NO: 3087 - protein, 7 aa, synthetic construct
GFTFDDY

SEQ ID NO: 3088 - protein, 7 aa, synthetic construct
GYTFTSY

SEQ ID NO: 3089 - protein, 7 aa, synthetic construct
GFTFSSY

SEQ ID NO: 3090 - protein, 7 aa, synthetic construct
GFTFSSY

SEQ ID NO: 3091 - protein, 9 aa, synthetic construct
GDSVSSNSA

SEQ ID NO: 3092 - protein, 7 aa, synthetic construct
GFTFSTY

SEQ ID NO: 3093 - protein, 9 aa, synthetic construct
GFSLSTSGM

SEQ ID NO: 3094 - protein, 7 aa, synthetic construct
EFIFRSY

SEQ ID NO: 3095 - protein, 7 aa, synthetic construct
GFTFSDY

SEQ ID NO: 3096 - protein, 7 aa, synthetic construct
GFTFSSY

SEQ ID NO: 3097 - protein, 7 aa, synthetic construct
GYTFTSY

SEQ ID NO: 3098 - protein, 9 aa, synthetic construct
GGSISSGGY

SEQ ID NO: 3099 - protein, 7 aa, synthetic construct
GFTFSSY

SEQ ID NO: 3100 - protein, 7 aa, synthetic construct
GFTFSSY

SEQ ID NO: 3101 - protein, 7 aa, synthetic construct
GFTFSSY

SEQ ID NO: 3102 - protein, 7 aa, synthetic construct
GFTFSSY

SEQ ID NO: 3103 - protein, 7 aa, synthetic construct
GFTFRNA

SEQ ID NO: 3104 - protein, 7 aa, synthetic construct
GYTFTSY

SEQ ID NO: 3105 - protein, 9 aa, synthetic construct
GDSVSSNSA

SEQ ID NO: 3106 - protein, 7 aa, synthetic construct
GFTFSSY

SEQ ID NO: 3107 - protein, 7 aa, synthetic construct
GFTFSSY

SEQ ID NO: 3108 - protein, 7 aa, synthetic construct
GFTFSNA

SEQ ID NO: 3109 - protein, 9 aa, synthetic construct
GDSVSSNSA

SEQ ID NO: 3110 - protein, 7 aa, synthetic construct
GFTFSSY

SEQ ID NO: 3111 - protein, 9 aa, synthetic construct
GGSITTRSY

SEQ ID NO: 3112 - protein, 9 aa, synthetic construct
GGSISTRSY

SEQ ID NO: 3113 - protein, 7 aa, synthetic construct
GGSFSGH

SEQ ID NO: 3114 - protein, 7 aa, synthetic construct
GGFLRGY

SEQ ID NO: 3115 - protein, 7 aa, synthetic construct
GYIFSNY

SEQ ID NO: 3116 - protein, 7 aa, synthetic construct
GFTFSSY

SEQ ID NO: 3117 - protein, 7 aa, synthetic construct
GFTFTSY

SEQ ID NO: 3118 - protein, 9 aa, synthetic construct
GGSISTRSY

SEQ ID NO: 3119 - protein, 7 aa, synthetic construct
GGSFSVY

SEQ ID NO: 3120 - protein, 9 aa, synthetic construct
GGSISSIIY

SEQ ID NO: 3121 - protein, 7 aa, synthetic construct
GGSFSGY

SEQ ID NO: 3122 - protein, 7 aa, synthetic construct
GGSFSGY

SEQ ID NO: 3123 - protein, 7 aa, synthetic construct
GYTFITY

SEQ ID NO: 3124 - protein, 7 aa, synthetic construct
GYTFITY

SEQ ID NO: 3125 - protein, 6 aa, synthetic construct
NPNSGN

SEQ ID NO: 3126 - protein, 6 aa, synthetic construct
IPIFGT

SEQ ID NO: 3127 - protein, 5 aa, synthetic construct
YYSGS

SEQ ID NO: 3128 - protein, 6 aa, synthetic construct
SSSSTY

SEQ ID NO: 3129 - protein, 5 aa, synthetic construct
GTAGD

SEQ ID NO: 3130 - protein, 6 aa, synthetic construct
SSSGST

SEQ ID NO: 3131 - protein, 6 aa, synthetic construct
SGSSSY

SEQ ID NO: 3132 - protein, 5 aa, synthetic construct
YSGGS

SEQ ID NO: 3133 - protein, 5 aa, synthetic construct
YYSGS

SEQ ID NO: 3134 - protein, 6 aa, synthetic construct
SAYNGN

SEQ ID NO: 3135 - protein, 6 aa, synthetic construct
KQDGSE

SEQ ID NO: 3136 - protein, 6 aa, synthetic construct
NPNSGN

SEQ ID NO: 3137 - protein, 5 aa, synthetic construct
GTAGD

SEQ ID NO: 3138 - protein, 6 aa, synthetic construct
SSSSSY

SEQ ID NO: 3139 - protein, 6 aa, synthetic construct
SSSSSY

SEQ ID NO: 3140 - protein, 6 aa, synthetic construct
NTNTGN

SEQ ID NO: 3141 - protein, 5 aa, synthetic construct
YSGGS

SEQ ID NO: 3142 - protein, 6 aa, synthetic construct
SSSSSY

SEQ ID NO: 3143 - protein, 5 aa, synthetic construct
YSGGS

SEQ ID NO: 3144 - protein, 7 aa, synthetic construct
YYRSKWY

SEQ ID NO: 3145 - protein, 6 aa, synthetic construct
YPGDSD

SEQ ID NO: 3146 - protein, 6 aa, synthetic construct
NSDGSS

SEQ ID NO: 3147 - protein, 6 aa, synthetic construct
KQDGSE

SEQ ID NO: 3148 - protein, 5 aa, synthetic construct
YYSGS

SEQ ID NO: 3149 - protein, 8 aa, synthetic construct
KSKTDGGT

SEQ ID NO: 3150 - protein, 8 aa, synthetic construct
KSKTDGGT

SEQ ID NO: 3151 - protein, 8 aa, synthetic construct
KSKTDGGT

SEQ ID NO: 3152 - protein, 6 aa, synthetic construct
SAYNGN

SEQ ID NO: 3153 - protein, 6 aa, synthetic construct
SGGGGS

SEQ ID NO: 3154 - protein, 5 aa, synthetic construct
GTAGD

SEQ ID NO: 3155 - protein, 6 aa, synthetic construct
NQDGSE

SEQ ID NO: 3156 - protein, 5 aa, synthetic construct
GAAGD

SEQ ID NO: 3157 - protein, 6 aa, synthetic construct
WYDGSN

SEQ ID NO: 3158 - protein, 6 aa, synthetic construct
NSDGSS

SEQ ID NO: 3159 - protein, 6 aa, synthetic construct
SWNSGS

SEQ ID NO: 3160 - protein, 6 aa, synthetic construct
SAYNGN

SEQ ID NO: 3161 - protein, 6 aa, synthetic construct
NPSGGS

SEQ ID NO: 3162 - protein, 5 aa, synthetic construct
GTAGD

SEQ ID NO: 3163 - protein, 6 aa, synthetic construct
SGSGGS

SEQ ID NO: 3164 - protein, 6 aa, synthetic construct
WYDGSN

SEQ ID NO: 3165 - protein, 6 aa, synthetic construct
SGISNY

SEQ ID NO: 3166 - protein, 6 aa, synthetic construct
SGSGGN

SEQ ID NO: 3167 - protein, 6 aa, synthetic construct
NPSGGT

SEQ ID NO: 3168 - protein, 6 aa, synthetic construct
KQDGSE

SEQ ID NO: 3169 - protein, 6 aa, synthetic construct
SAYNGN

SEQ ID NO: 3170 - protein, 6 aa, synthetic construct
SAYNGN

SEQ ID NO: 3171 - protein, 6 aa, synthetic construct
SSSSST

SEQ ID NO: 3172 - protein, 5 aa, synthetic construct
GTAGD

SEQ ID NO: 3173 - protein, 6 aa, synthetic construct
IPNSGN

SEQ ID NO: 3174 - protein, 6 aa, synthetic construct
NPSGGS

SEQ ID NO: 3175 - protein, 8 aa, synthetic construct
KSKTDGGT

SEQ ID NO: 3176 - protein, 6 aa, synthetic construct
WYDGNN

SEQ ID NO: 3177 - protein, 6 aa, synthetic construct
WYDGSN

SEQ ID NO: 3178 - protein, 6 aa, synthetic construct
NWNGGS

SEQ ID NO: 3179 - protein, 6 aa, synthetic construct
SSSSSY

SEQ ID NO: 3180 - protein, 6 aa, synthetic construct
SGSGGS

SEQ ID NO: 3181 - protein, 5 aa, synthetic construct
GTAGD

SEQ ID NO: 3182 - protein, 6 aa, synthetic construct
NWNGGT

SEQ ID NO: 3183 - protein, 6 aa, synthetic construct
SSSSTY

SEQ ID NO: 3184 - protein, 6 aa, synthetic construct
NSDGSS

SEQ ID NO: 3185 - protein, 6 aa, synthetic construct
SSSSTY

SEQ ID NO: 3186 - protein, 6 aa, synthetic construct
SGSGGS

SEQ ID NO: 3187 - protein, 6 aa, synthetic construct
SGYSGY

SEQ ID NO: 3188 - protein, 6 aa, synthetic construct
SRSSGT

SEQ ID NO: 3189 - protein, 6 aa, synthetic construct
SSSSDT

SEQ ID NO: 3190 - protein, 5 aa, synthetic construct
YHSGS

SEQ ID NO: 3191 - protein, 6 aa, synthetic construct
NLDGSE

SEQ ID NO: 3192 - protein, 6 aa, synthetic construct
KHDGSE

SEQ ID NO: 3193 - protein, 6 aa, synthetic construct
SAFNGN

SEQ ID NO: 3194 - protein, 5 aa, synthetic construct
GTAGD

SEQ ID NO: 3195 - protein, 8 aa, synthetic construct
KSKTDGGT

SEQ ID NO: 3196 - protein, 6 aa, synthetic construct
SGGGGS

SEQ ID NO: 3197 - protein, 6 aa, synthetic construct
WYDGSN

SEQ ID NO: 3198 - protein, 6 aa, synthetic construct
SSSSSY

SEQ ID NO: 3199 - protein, 6 aa, synthetic construct
SSSSSY

SEQ ID NO: 3200 - protein, 6 aa, synthetic construct
NPNSGG

SEQ ID NO: 3201 - protein, 8 aa, synthetic construct
KSKTDGGT

SEQ ID NO: 3202 - protein, 6 aa, synthetic construct
NPNSGG

SEQ ID NO: 3203 - protein, 6 aa, synthetic construct
NPNSGN

SEQ ID NO: 3204 - protein, 8 aa, synthetic construct
KSKTDGGT

SEQ ID NO: 3205 - protein, 6 aa, synthetic construct
KQDGSD

SEQ ID NO: 3206 - protein, 6 aa, synthetic construct
NPNSGN

SEQ ID NO: 3207 - protein, 6 aa, synthetic construct
WYDGSN

SEQ ID NO: 3208 - protein, 5 aa, synthetic construct
SSRGR

SEQ ID NO: 3209 - protein, 6 aa, synthetic construct
GSSSSY

SEQ ID NO: 3210 - protein, 6 aa, synthetic construct
SSSSSY

SEQ ID NO: 3211 - protein, 6 aa, synthetic construct
SSSSSY

SEQ ID NO: 3212 - protein, 6 aa, synthetic construct
SAYNGN

SEQ ID NO: 3213 - protein, 6 aa, synthetic construct
NPNSGG

SEQ ID NO: 3214 - protein, 6 aa, synthetic construct
NPNSGG

SEQ ID NO: 3215 - protein, 6 aa, synthetic construct
NSDGSN

SEQ ID NO: 3216 - protein, 7 aa, synthetic construct
YYRSKWY

SEQ ID NO: 3217 - protein, 6 aa, synthetic construct
SAYNGN

SEQ ID NO: 3218 - protein, 6 aa, synthetic construct
NPNSGG

SEQ ID NO: 3219 - protein, 6 aa, synthetic construct
ISSTSY

SEQ ID NO: 3220 - protein, 6 aa, synthetic construct
SWNSGS

SEQ ID NO: 3221 - protein, 6 aa, synthetic construct
WYDGSN

SEQ ID NO: 3222 - protein, 5 aa, synthetic construct
FWNDD

SEQ ID NO: 3223 - protein, 6 aa, synthetic construct
NWNGGS

SEQ ID NO: 3224 - protein, 6 aa, synthetic construct
NPNSGN

SEQ ID NO: 3225 - protein, 6 aa, synthetic construct
SSSSSY

SEQ ID NO: 3226 - protein, 6 aa, synthetic construct
KQDGSE

SEQ ID NO: 3227 - protein, 7 aa, synthetic construct
YYRSKWY

SEQ ID NO: 3228 - protein, 6 aa, synthetic construct
SSSSTY

SEQ ID NO: 3229 - protein, 5 aa, synthetic construct
DWDDD

SEQ ID NO: 3230 - protein, 6 aa, synthetic construct
SISSRT

SEQ ID NO: 3231 - protein, 6 aa, synthetic construct
SSSGST

SEQ ID NO: 3232 - protein, 6 aa, synthetic construct
SSSSST

SEQ ID NO: 3233 - protein, 6 aa, synthetic construct
NPNSGN

SEQ ID NO: 3234 - protein, 5 aa, synthetic construct
YYSGS

SEQ ID NO: 3235 - protein, 6 aa, synthetic construct
KQDGSE

SEQ ID NO: 3236 - protein, 6 aa, synthetic construct
SSSSST

SEQ ID NO: 3237 - protein, 6 aa, synthetic construct
SGSGGS

SEQ ID NO: 3238 - protein, 6 aa, synthetic construct
WYDGSN

SEQ ID NO: 3239 - protein, 8 aa, synthetic construct
KTKTDGGA

SEQ ID NO: 3240 - protein, 6 aa, synthetic construct
SAYNGN

SEQ ID NO: 3241 - protein, 7 aa, synthetic construct
YYRSKWY

SEQ ID NO: 3242 - protein, 6 aa, synthetic construct
SSSSSY

SEQ ID NO: 3243 - protein, 6 aa, synthetic construct
SSSTST

SEQ ID NO: 3244 - protein, 8 aa, synthetic construct
KSKTDGGT

SEQ ID NO: 3245 - protein, 7 aa, synthetic construct
YYRSKWY

SEQ ID NO: 3246 - protein, 6 aa, synthetic construct
KQDGSE

SEQ ID NO: 3247 - protein, 5 aa, synthetic construct
YYSGN

SEQ ID NO: 3248 - protein, 5 aa, synthetic construct
YYSGS

SEQ ID NO: 3249 - protein, 5 aa, synthetic construct
NHSGF

SEQ ID NO: 3250 - protein, 5 aa, synthetic construct
NHSGS

SEQ ID NO: 3251 - protein, 6 aa, synthetic construct
NPYNVN

SEQ ID NO: 3252 - protein, 6 aa, synthetic construct
SSSSSY

SEQ ID NO: 3253 - protein, 6 aa, synthetic construct
TPSGGT

SEQ ID NO: 3254 - protein, 5 aa, synthetic construct
FYSGS

SEQ ID NO: 3255 - protein, 5 aa, synthetic construct
NHSGS

SEQ ID NO: 3256 - protein, 5 aa, synthetic construct
YYSGS

SEQ ID NO: 3257 - protein, 5 aa, synthetic construct
NHSGN

SEQ ID NO: 3258 - protein, 5 aa, synthetic construct
NHSGS

SEQ ID NO: 3259 - protein, 6 aa, synthetic construct
SAYNGN

SEQ ID NO: 3260 - protein, 6 aa, synthetic construct
SSYNGN

SEQ ID NO: 3261 - protein, 11 aa, synthetic construct
CARWGRGFDPW

SEQ ID NO: 3262 - protein, 14 aa, synthetic construct
CARERLELRWFDPW

SEQ ID NO: 3263 - protein, 12 aa, synthetic construct
CARQTDYWFDPW

SEQ ID NO: 3264 - protein, 15 aa, synthetic construct
CAREGGIAVAGFDYW

SEQ ID NO: 3265 - protein, 16 aa, synthetic construct [sequence omitted]

SEQ ID NO: 3266 - protein, 15 aa, synthetic construct
CAREETMVRGVIAYW

SEQ ID NO: 3267 - protein, 11 aa, synthetic construct
CARDWGSFDLW

SEQ ID NO: 3268 - protein, 17 aa, synthetic construct
CARDGGEYSSSYYFDYW

SEQ ID NO: 3269 - protein, 11 aa, synthetic construct
CARHDPSFDYW

SEQ ID NO: 3270 - protein, 13 aa, synthetic construct
CARERSNWDFDYW

SEQ ID NO: 3271 - protein, 17 aa, synthetic construct
CARDGGVRGVITYFDYW

SEQ ID NO: 3272 - protein, 16 aa, synthetic construct
CARGRGSSWYWYFDLW

SEQ ID NO: 3273 - protein, 13 aa, synthetic construct
CARGSSSSAFDIW

SEQ ID NO: 3274 - protein, 15 aa, synthetic construct [sequence omitted]

SEQ ID NO: 3275 - protein, 15 aa, synthetic construct
CARADSLTGGFFDYW

SEQ ID NO: 3276 - protein, 11 aa, synthetic construct
CAERGWNYDYW

SEQ ID NO: 3277 - protein, 14 aa, synthetic construct
CARDSTTVTLFDYW

SEQ ID NO: 3278 - protein, 16 aa, synthetic construct
CARGIAVAGPHAFDIW

SEQ ID NO: 3279 - protein, 12 aa, synthetic construct
CARGYSGSYAYW

SEQ ID NO: 3280 - protein, 14 aa, synthetic construct
CARKWELRDAFDIW

SEQ ID NO: 3281 - protein, 16 aa, synthetic construct
CAKRRMTGSHSWFDPW

SEQ ID NO: 3282 - protein, 7 aa, synthetic construct [sequence omitted]

SEQ ID NO: 3283 - protein, 8 aa, synthetic construct
CARDGGTP

SEQ ID NO: 3284 - protein, 11 aa, synthetic construct
CAIVGARFDYW

SEQ ID NO: 3285 - protein, 8 aa, synthetic construct
CTTGGTHW

SEQ ID NO: 3286 - protein, 8 aa, synthetic construct
CTTGGYRW

SEQ ID NO: 3287 - protein, 8 aa, synthetic construct
CTTDLYYW

SEQ ID NO: 3288 - protein, 10 aa, synthetic construct
CARGWYFDYW

SEQ ID NO: 3289 - protein, 10 aa, synthetic construct
CAKRVFFDYW

SEQ ID NO: 3290 - protein, 12 aa, synthetic construct
CARDLGRVFDYW

SEQ ID NO: 3291 - protein, 11 aa, synthetic construct
CATDLNWNGYW

SEQ ID NO: 3292 - protein, 12 aa, synthetic construct
CATGYNWNPDYW

SEQ ID NO: 3293 - protein, 12 aa, synthetic construct
CARDRSSSSDYW

SEQ ID NO: 3294 - protein, 12 aa, synthetic construct
CAGITGTYFDYW

SEQ ID NO: 3295 - protein, 12 aa, synthetic construct
CAKDSGYSPDYW

SEQ ID NO: 3296 - protein, 12 aa, synthetic construct
CARDRPYYFDYW

SEQ ID NO: 3297 - protein, 12 aa, synthetic construct
CARGGWGTMDVW

SEQ ID NO: 3298 - protein, 13 aa, synthetic construct
CARAWELDAFDIW

SEQ ID NO: 3299 - protein, 12 aa, synthetic construct
CAKDNWNYFDYW

SEQ ID NO: 3300 - protein, 12 aa, synthetic construct
CARVYNWIFDYW

SEQ ID NO: 3301 - protein, 12 aa, synthetic construct
CARITVVSFDYW

SEQ ID NO: 3302 - protein, 12 aa, synthetic construct
CAKAAAGKGDYW

SEQ ID NO: 3303 - protein, 12 aa, synthetic construct
CARGDWGTMDVW

SEQ ID NO: 3304 - protein, 12 aa, synthetic construct
CARDGTGWFDPW

SEQ ID NO: 3305 - protein, 12 aa, synthetic construct [sequence omitted]

SEQ ID NO: 3306 - protein, 12 aa, synthetic construct
CARPLSGTLDNW

SEQ ID NO: 3307 - protein, 13 aa, synthetic construct
CARESIAALFDYW

SEQ ID NO: 3308 - protein, 14 aa, synthetic construct
CARGDHSYGGLDYW

SEQ ID NO: 3309 - protein, 13 aa, synthetic construct
CARGDWAWSFDLW

SEQ ID NO: 3310 - protein, 13 aa, synthetic construct
CARGLRRDWFDPW

SEQ ID NO: 3311 - protein, 11 aa, synthetic construct
CTTGTGRSDYW

SEQ ID NO: 3312 - protein, 13 aa, synthetic construct
CVRGGVGDGFDMW

SEQ ID NO: 3313 - protein, 13 aa, synthetic construct
CASVGSYGYFQHW

SEQ ID NO: 3314 - protein, 13 aa, synthetic construct
CARKGNWNSFDYW

SEQ ID NO: 3315 - protein, 13 aa, synthetic construct
CARDSAYYTFDYW

SEQ ID NO: 3316 - protein, 13 aa, synthetic construct
CGSGWYEGAFDYW

SEQ ID NO: 3317 - protein, 15 aa, synthetic construct
CARDRDSSHDAFDIW

SEQ ID NO: 3318 - protein, 14 aa, synthetic construct
CVRDEIWNYYFDYW

SEQ ID NO: 3319 - protein, 14 aa, synthetic construct
CARDSYDFHAFDIW

SEQ ID NO: 3320 - protein, 14 aa, synthetic construct
CARVGWGGHAFDIW

SEQ ID NO: 3321 - protein, 14 aa, synthetic construct
CARGYNWNYVGDYW

SEQ ID NO: 3322 - protein, 14 aa, synthetic construct
CAKDANWGYAFDIW

SEQ ID NO: 3323 - protein, 15 aa, synthetic construct
CARRFIWNYGDFDYW

SEQ ID NO: 3324 - protein, 15 aa, synthetic construct
CARGRLGIEDYFDYW

SEQ ID NO: 3325 - protein, 15 aa, synthetic construct
CARECYSSSWAFDYW

SEQ ID NO: 3326 - protein, 15 aa, synthetic construct
CARDVGVDGRGFDYW

SEQ ID NO: 3327 - protein, 15 aa, synthetic construct
CARDILWSGGYLDVW

SEQ ID NO: 3328 - protein, 15 aa, synthetic construct
CARKQLWLNWYFDFW

SEQ ID NO: 3329 - protein, 15 aa, synthetic construct
CARENNWNYGWFDPW

SEQ ID NO: 3330 - protein, 16 aa, synthetic construct
CAREGYGDYPLPMDVW

SEQ ID NO: 3331 - protein, 13 aa, synthetic construct
CTTDNWNSYFDYW

SEQ ID NO: 3332 - protein, 15 aa, synthetic construct
CAGNSGYDSPYFDYW

SEQ ID NO: 3333 - protein, 15 aa, synthetic construct
CAREYSSSSDWFDPW

SEQ ID NO: 3334 - protein, 15 aa, synthetic construct
CARDGGITGRYFDLW

SEQ ID NO: 3335 - protein, 15 aa, synthetic construct
CAREGNWGPYYFDYW

SEQ ID NO: 3336 - protein, 15 aa, synthetic construct
CARGVWSGYYTFDPW

SEQ ID NO: 3337 - protein, 13 aa, synthetic construct
CTPHSSSPVFDYW

SEQ ID NO: 3338 - protein, 16 aa, synthetic construct
CARDDTGTTGGYFQHW

SEQ ID NO: 3339 - protein, 16 aa, synthetic construct
CARAVAVAGTGWFDPW

SEQ ID NO: 3340 - protein, 14 aa, synthetic construct
CTTNYGDYVGFDYW

SEQ ID NO: 3341 - protein, 16 aa, synthetic construct
CAREIDWNYGFHFDYW

SEQ ID NO: 3342 - protein, 16 aa, synthetic construct
CARGYYDFWSGPFDYW

SEQ ID NO: 3343 - protein, 16 aa, synthetic construct
CARDSKWELLNWFDPW

SEQ ID NO: 3344 - protein, 17 aa, synthetic construct
CARGRHFDWLLSYFDYW

SEQ ID NO: 3345 - protein, 24 aa, synthetic construct
CARDRAIVGATWFDPWGQGTLVIV

SEQ ID NO: 3346 - protein, 16 aa, synthetic construct
CARDRYNWNYRYFDLW

SEQ ID NO: 3347 - protein, 16 aa, synthetic construct
CARDSHDYGDSYFDYW

SEQ ID NO: 3348 - protein, 16 aa, synthetic construct
CARDGAARPPRYMDVW

SEQ ID NO: 3349 - protein, 16 aa, synthetic construct
CARSDSGSHYVFFDDW

SEQ ID NO: 3350 - protein, 16 aa, synthetic construct
CARDLDYYGSGNYDYW

SEQ ID NO: 3351 - protein, 16 aa, synthetic construct
CARNRDYHGSGSFDYW

SEQ ID NO: 3352 - protein, 12 aa, synthetic construct
CARDWNFAFDIW

SEQ ID NO: 3353 - protein, 16 aa, synthetic construct
CARTIFGVVNNWFDPW

SEQ ID NO: 3354 - protein, 16 aa, synthetic construct
CARDGEQLALNWFDPW

SEQ ID NO: 3355 - protein, 16 aa, synthetic construct
CARETPVTLFDAFDIW

SEQ ID NO: 3356 - protein, 16 aa, synthetic construct
CAKDIFTGRAGYFDYW

SEQ ID NO: 3357 - protein, 16 aa, synthetic construct
CARAITGTTGNWFDPW

SEQ ID NO: 3358 - protein, 15 aa, synthetic construct
CTHTEYGSSWSVDYW

SEQ ID NO: 3359 - protein, 16 aa, synthetic construct
CARHFDWLLSNAFDIW

SEQ ID NO: 3360 - protein, 17 aa, synthetic construct
CVRRITVVRGVISLDYW

SEQ ID NO: 3361 - protein, 17 aa, synthetic construct [sequence omitted]

SEQ ID NO: 3362 - protein, 18 aa, synthetic construct
CARDDTIFGVVTDAFDIW

SEQ ID NO: 3363 - protein, 14 aa, synthetic construct
CARGVGARGWFDPW

SEQ ID NO: 3364 - protein, 18 aa, synthetic construct
CARDPPLSGSYAGEFDYW

SEQ ID NO: 3365 - protein, 17 aa, synthetic construct
CARRRGYSYGWGDFDYW

SEQ ID NO: 3366 - protein, 18 aa, synthetic construct
CARGGLLNWNYEGWFDPW

SEQ ID NO: 3367 - protein, 18 aa, synthetic construct
CARDGGIAARPDWYFDLW

SEQ ID NO: 3368 - protein, 18 aa, synthetic construct
CARTYYYGSGSYYTLDYW

SEQ ID NO: 3369 - protein, 18 aa, synthetic construct
CARGGITIFGVVTPFDYW

SEQ ID NO: 3370 - protein, 18 aa, synthetic construct
CARDALHYYGSGSAFDYW

SEQ ID NO: 3371 - protein, 19 aa, synthetic construct
CAREGVLWFGEFYYYMDVW

SEQ ID NO: 3372 - protein, 19 aa, synthetic construct
CARDGDYYDSSGYYHFDYW

SEQ ID NO: 3373 - protein, 19 aa, synthetic construct
CAKDRGGENWNYGGWFDPW

SEQ ID NO: 3374 - protein, 19 aa, synthetic construct
CAGAYYYDSSGYLNYMDVW

SEQ ID NO: 3375 - protein, 17 aa, synthetic construct
CTTDHIEYSSLYYFDYW

SEQ ID NO: 3376 - protein, 19 aa, synthetic construct
CARQLAYCGGDCYLYFDYW

SEQ ID NO: 3377 - protein, 15 aa, synthetic construct
CAREAYWNYGGFDYW

SEQ ID NO: 3378 - protein, 20 aa, synthetic construct
CARDGRITMVRGVRNWFDPW

SEQ ID NO: 3379 - protein, 20 aa, synthetic construct
CARMSSQLELHYYCYYMDVW

SEQ ID NO: 3380 - protein, 18 aa, synthetic construct
CTTDLGYSGYDWGAFDYW

SEQ ID NO: 3381 - protein, 16 aa, synthetic construct
CARDRVNWNDVGFDYW

SEQ ID NO: 3382 - protein, 20 aa, synthetic construct
CARTPGYSSSWYEGPYFDYW

SEQ ID NO: 3383 - protein, 12 aa, synthetic construct
CAREDLIGNDYW

SEQ ID NO: 3384 - protein, 12 aa, synthetic construct
CAREDLIGNDYW

SEQ ID NO: 3385 - protein, 14 aa, synthetic construct
CAREGLTGHVFDIW

SEQ ID NO: 3386 - protein, 14 aa, synthetic construct
CAREGLTGHTFDIW

SEQ ID NO: 3387 - protein, 21 aa, synthetic construct
CARGVWGSYRSHSYYTFMDVW

SEQ ID NO: 3388 - protein, 21 aa, synthetic construct
CARDYRPYYDILTGYSHFDYW

SEQ ID NO: 3389 - protein, 21 aa, synthetic construct
CARRVLWFGELRDYFYYMDVW

SEQ ID NO: 3390 - protein, 20 aa, synthetic construct
CVRQGYDSWTGYSFFYFDYW

SEQ ID NO: 3391 - protein, 15 aa, synthetic construct
CARGGGYSFGGFDYW

SEQ ID NO: 3392 - protein, 14 aa, synthetic construct
CARQNWGSDAFDIW

SEQ ID NO: 3393 - protein, 16 aa, synthetic construct
CARGELGIGYWYFDLW

SEQ ID NO: 3394 - protein, 16 aa, synthetic construct
CAREGGTTHEPLFDYW

SEQ ID NO: 3395 - protein, 27 aa, synthetic construct
CARAPGGSCGSTNCYKWNYDPYYFDYW

SEQ ID NO: 3396 - protein, 27 aa, synthetic construct
CARAPGGDCSSTSCYKWNYDPYYFDYW

SEQ ID NO: 3397 - protein, 11 aa, synthetic construct
SGDKLGDKYAC

SEQ ID NO: 3398 - protein, 14 aa, synthetic construct
TGTSSDVGGYNYVS

SEQ ID NO: 3399 - protein, 14 aa, synthetic construct
TGTSSDVGGYNYVS

SEQ ID NO: 3400 - protein, 14 aa, synthetic construct
TGTSSDVGGYNYVS

SEQ ID NO: 3401 - protein, 11 aa, synthetic construct
GGNNIGSKNVH

SEQ ID NO: 3402 - protein, 14 aa, synthetic construct
TGTSSDVGGYNYVS

SEQ ID NO: 3403 - protein, 11 aa, synthetic construct
SGDALPKKYAY

SEQ ID NO: 3404 - protein, 14 aa, synthetic construct
TGTSSDVGGYNYVS

SEQ ID NO: 3405 - protein, 12 aa, synthetic construct
TLSSEHSTYTIE

SEQ ID NO: 3406 - protein, 11 aa, synthetic construct
GGNNIGSKSVH

SEQ ID NO: 3407 - protein, 11 aa, synthetic construct
SGDKLGDKYAC

SEQ ID NO: 3408 - protein, 11 aa, synthetic construct
SGDKLGDKYAC

SEQ ID NO: 3409 - protein, 11 aa, synthetic construct
GGNNIGSKNVH

SEQ ID NO: 3410 - protein, 11 aa, synthetic construct
SGDVLAKKYAR

SEQ ID NO: 3411 - protein, 11 aa, synthetic construct
SGDALPKKYAY

SEQ ID NO: 3412 - protein, 14 aa, synthetic construct
GSSTGAVTSGHYPY

SEQ ID NO: 3413 - protein, 14 aa, synthetic construct
TGTSSDVGGYNYVS

SEQ ID NO: 3414 - protein, 14 aa, synthetic construct
TGTSSDVGGYNYVS

SEQ ID NO: 3415 - protein, 14 aa, synthetic construct
TGSSSNIGAGYDVH

SEQ ID NO: 3416 - protein, 14 aa, synthetic construct
TGTSSDVGGYNYVS

SEQ ID NO: 3417 - protein, 11 aa, synthetic construct
EGDNIGSESVH

SEQ ID NO: 3418 - protein, 14 aa, synthetic construct
TGTSSDVGGYNYVS

SEQ ID NO: 3419 - protein, 11 aa, synthetic construct
SGDALPKKYAY

SEQ ID NO: 3420 - protein, 11 aa, synthetic construct
SGDVLAKKYAR

SEQ ID NO: 3421 - protein, 11 aa, synthetic construct
SADALPNQYAY

SEQ ID NO: 3422 - protein, 11 aa, synthetic construct
SADALSKQYAY

SEQ ID NO: 3423 - protein, 11 aa, synthetic construct
SGDALPKKYAY

SEQ ID NO: 3424 - protein, 14 aa, synthetic construct
TGTSSDVGGYNYVS

SEQ ID NO: 3425 - protein, 14 aa, synthetic construct
TGTSSDVGGYNYVS

SEQ ID NO: 3426 - protein, 11 aa, synthetic construct
SGDALPKKYAY

SEQ ID NO: 3427 - protein, 14 aa, synthetic construct
TGTSSDVGGYDYVS

SEQ ID NO: 3428 - protein, 14 aa, synthetic construct
TLRSGINVGTYRIY

SEQ ID NO: 3429 - protein, 11 aa, synthetic construct
SGDVLAKKYAR

SEQ ID NO: 3430 - protein, 11 aa, synthetic construct
SGDVLAKKYAR

SEQ ID NO: 3431 - protein, 11 aa, synthetic construct
SGDALPKKYAY

SEQ ID NO: 3432 - protein, 11 aa, synthetic construct
SGDALPKKYAY

SEQ ID NO: 3433 - protein, 11 aa, synthetic construct
QGDSLRSYYAS

SEQ ID NO: 3434 - protein, 11 aa, synthetic construct
QGDSLRSYYAS

SEQ ID NO: 3435 - protein, 11 aa, synthetic construct
SGDALPKKYAY

SEQ ID NO: 3436 - protein, 11 aa, synthetic construct
SGDALPKKYAY

SEQ ID NO: 3437 - protein, 14 aa, synthetic construct
TGTNNDVGYYNYVS

SEQ ID NO: 3438 - protein, 14 aa, synthetic construct
TGTSSDVGGYNYVS

SEQ ID NO: 3439 - protein, 14 aa, synthetic construct
TGTSSDVGNYNYVS

SEQ ID NO: 3440 - protein, 14 aa, synthetic construct
TGSSSNIGAGYDVH

SEQ ID NO: 3441 - protein, 14 aa, synthetic construct
TGTSSDVGGYNYVS

SEQ ID NO: 3442 - protein, 14 aa, synthetic construct
TGTSSDVGGYNYVS

SEQ ID NO: 3443 - protein, 11 aa, synthetic construct
QGDSLRSYYAS

SEQ ID NO: 3444 - protein, 11 aa, synthetic construct
SGEALPKKYAY

SEQ ID NO: 3445 - protein, 14 aa, synthetic construct
TGTSSDVGGYNYVS

SEQ ID NO: 3446 - protein, 14 aa, synthetic construct
TGTSSDVGGYNYVS

SEQ ID NO: 3447 - protein, 14 aa, synthetic construct
TGTSSDVGGYNYVS

SEQ ID NO: 3448 - protein, 14 aa, synthetic construct
TGTSSDVGGYNYVS

SEQ ID NO: 3449 - protein, 14 aa, synthetic construct
TGTSSDVGGYNYVS

SEQ ID NO: 3450 - protein, 14 aa, synthetic construct
TGTSSDVGGYNYVS

SEQ ID NO: 3451 - protein, 14 aa, synthetic construct
TGTSSDVGGYNYVS

SEQ ID NO: 3452 - protein, 14 aa, synthetic construct
TGTSSDVGGYNYVS

SEQ ID NO: 3453 - protein, 11 aa, synthetic construct
SGDKLGDKYAC

SEQ ID NO: 3454 - protein, 11 aa, synthetic construct
SGDVLAKKYAR

SEQ ID NO: 3455 - protein, 11 aa, synthetic construct
SGDALPKKYAY

SEQ ID NO: 3456 - protein, 11 aa, synthetic construct
QGDSLRSYYAS

SEQ ID NO: 3457 - protein, 14 aa, synthetic construct
TGTSSDVGGYNYVS

SEQ ID NO: 3458 - protein, 14 aa, synthetic construct
TGSSSNIGAGYDVH

SEQ ID NO: 3459 - protein, 11 aa, synthetic construct
SRDKLGDKYAC

SEQ ID NO: 3460 - protein, 11 aa, synthetic construct
SGDKLGDRYAC

SEQ ID NO: 3461 - protein, 11 aa, synthetic construct
QGDSLRSYYAS

SEQ ID NO: 3462 - protein, 11 aa, synthetic construct
SGDKLENKYTC

SEQ ID NO: 3463 - protein, 11 aa, synthetic construct
QGDNIRNYYAS

SEQ ID NO: 3464 - protein, 11 aa, synthetic construct
QGDSLRRYYAS

SEQ ID NO: 3465 - protein, 11 aa, synthetic construct
QGDSLRSYYAS

SEQ ID NO: 3466 - protein, 11 aa, synthetic construct
SGDALPKKYAY

SEQ ID NO: 3467 - protein, 11 aa, synthetic construct
SGDALPKKYAY

SEQ ID NO: 3468 - protein, 11 aa, synthetic construct
SGDALPKKYAY

SEQ ID NO: 3469 - protein, 11 aa, synthetic construct
SGDALPKKYAY

SEQ ID NO: 3470 - protein, 14 aa, synthetic construct
TGTSSDVGGYNYVS

SEQ ID NO: 3471 - protein, 14 aa, synthetic construct
TGTSSDVGGYNYVS

SEQ ID NO: 3472 - protein, 14 aa, synthetic construct
TGTSSDVGGYNYVS

SEQ ID NO: 3473 - protein, 14 aa, synthetic construct
TGTSSDVGGYNYVS

SEQ ID NO: 3474 - protein, 11 aa, synthetic construct
SGDKLGDKYAC

SEQ ID NO: 3475 - protein, 11 aa, synthetic construct
SGDKLGDKYAC

SEQ ID NO: 3476 - protein, 11 aa, synthetic construct
SGDVLAKKYAR

SEQ ID NO: 3477 - protein, 11 aa, synthetic construct
SGDALPQKYAF

SEQ ID NO: 3478 - protein, 11 aa, synthetic construct
SGDALPKKYAY

SEQ ID NO: 3479 - protein, 11 aa, synthetic construct
SGDALPKKYAY

SEQ ID NO: 3480 - protein, 11 aa, synthetic construct
QGDSLRSYYAS

SEQ ID NO: 3481 - protein, 11 aa, synthetic construct
QGDSLRNYYAS

SEQ ID NO: 3482 - protein, 11 aa, synthetic construct
QGDSLRSYYAS

SEQ ID NO: 3483 - protein, 11 aa, synthetic construct
SGDALPKKYAY

SEQ ID NO: 3484 - protein, 11 aa, synthetic construct
QGDSLRSYYAS

SEQ ID NO: 3485 - protein, 11 aa, synthetic construct
QGDSLRSYYAS

SEQ ID NO: 3486 - protein, 11 aa, synthetic construct
QGDSLRSYYAS

SEQ ID NO: 3487 - protein, 11 aa, synthetic construct
QGDSLRSYYAS

SEQ ID NO: 3488 - protein, 11 aa, synthetic construct
QGDSLRSYYAS

SEQ ID NO: 3489 - protein, 13 aa, synthetic construct
SGSSSNIGYNAVN

SEQ ID NO: 3490 - protein, 14 aa, synthetic construct
TGTSSDVGGYNYVS

SEQ ID NO: 3491 - protein, 14 aa, synthetic construct
TGSSSNIGARYDVH

SEQ ID NO: 3492 - protein, 14 aa, synthetic construct
TGSSSNIGAGYDVH

SEQ ID NO: 3493 - protein, 14 aa, synthetic construct
TGSSSNIGAGYDVH

SEQ ID NO: 3494 - protein, 14 aa, synthetic construct
TLRSGINVGTSRIY

SEQ ID NO: 3495 - protein, 14 aa, synthetic construct
TLRSGINVGTYRIY

SEQ ID NO: 3496 - protein, 11 aa, synthetic construct
SGAKLGDKYAC

SEQ ID NO: 3497 - protein, 11 aa, synthetic construct
SGDALPKKYAY

SEQ ID NO: 3498 - protein, 11 aa, synthetic construct
QGDSLRSYYAS

SEQ ID NO: 3499 - protein, 11 aa, synthetic construct
SGDKLGDKYAC

SEQ ID NO: 3500 - protein, 11 aa, synthetic construct
QGDSLRSYYAS

SEQ ID NO: 3501 - protein, 11 aa, synthetic construct
SGDALPKKYAY

SEQ ID NO: 3502 - protein, 11 aa, synthetic construct
SGDALPKKYAY

SEQ ID NO: 3503 - protein, 11 aa, synthetic construct
SGDALPKKYAY

SEQ ID NO: 3504 - protein, 14 aa, synthetic construct
TGSSSNIGAGYDVH

SEQ ID NO: 3505 - protein, 14 aa, synthetic construct
TLRSGINVGTYRIY

SEQ ID NO: 3506 - protein, 11 aa, synthetic construct
SGDKLGDKYAC

SEQ ID NO: 3507 - protein, 11 aa, synthetic construct
QGDSLRRYYAS

SEQ ID NO: 3508 - protein, 11 aa, synthetic construct
SGDALPKKYAY

SEQ ID NO: 3509 - protein, 11 aa, synthetic construct
SGDALPKKYAY

SEQ ID NO: 3510 - protein, 11 aa, synthetic construct
GGNNIGGKSVH

SEQ ID NO: 3511 - protein, 13 aa, synthetic construct
SGSNSNIGFNTVN

SEQ ID NO: 3512 - protein, 14 aa, synthetic construct
TGTSSDVGGYNYVS

SEQ ID NO: 3513 - protein, 14 aa, synthetic construct
TGTSSDVGGYNYVS

SEQ ID NO: 3514 - protein, 11 aa, synthetic construct
SGDKLGNKYAC

SEQ ID NO: 3515 - protein, 11 aa, synthetic construct
SGDKLGDKYAC

SEQ ID NO: 3516 - protein, 11 aa, synthetic construct
SGDKLGDKYAC

SEQ ID NO: 3517 - protein, 11 aa, synthetic construct
SGDKLGDKYAC

SEQ ID NO: 3518 - protein, 11 aa, synthetic construct
SGDALPKKYAY

SEQ ID NO: 3519 - protein, 11 aa, synthetic construct
SGDALPKKYAY

SEQ ID NO: 3520 - protein, 13 aa, synthetic construct
SGSSSNIGINTVN

SEQ ID NO: 3521 - protein, 14 aa, synthetic construct
ASSTGAVTSGYYPN

SEQ ID NO: 3522 - protein, 14 aa, synthetic construct
TGTSSDVGGYNYVS

SEQ ID NO: 3523 - protein, 11 aa, synthetic construct
SGNLLAKKYPR

SEQ ID NO: 3524 - protein, 11 aa, synthetic construct
QGDSLRSYYAS

SEQ ID NO: 3525 - protein, 11 aa, synthetic construct
SGDALPKKYAY

SEQ ID NO: 3526 - protein, 14 aa, synthetic construct
TGTSSDVGGYNYVS

SEQ ID NO: 3527 - protein, 13 aa, synthetic construct
SGSSSNIGSKTVN

SEQ ID NO: 3528 - protein, 11 aa, synthetic construct
GENNIGSRNVH

SEQ ID NO: 3529 - protein, 11 aa, synthetic construct
QGDSLRSYYAS

SEQ ID NO: 3530 - protein, 11 aa, synthetic construct
SGDALPKKYAY

SEQ ID NO: 3531 - protein, 14 aa, synthetic construct
TGTSSDVGGYNYVS

SEQ ID NO: 3532 - protein, 14 aa, synthetic construct
TGTSSDVGGYNHVS

SEQ ID NO: 3533 - protein, 7 aa, synthetic construct
QDSKRPS

SEQ ID NO: 3534 - protein, 7 aa, synthetic construct
DVSKRPS

SEQ ID NO: 3535 - protein, 7 aa, synthetic construct
DVSKRPS

SEQ ID NO: 3536 - protein, 7 aa, synthetic construct
EVSNRPS

SEQ ID NO: 3537 - protein, 7 aa, synthetic construct
RDSNRPS

SEQ ID NO: 3538 - protein, 7 aa, synthetic construct
EVSNRPS

SEQ ID NO: 3539 - protein, 7 aa, synthetic construct
EDSKRPS

SEQ ID NO: 3540 - protein, 7 aa, synthetic construct
EVSKRPS

SEQ ID NO: 3541 - protein, 11 aa, synthetic construct
VKSDGSHSKGD

SEQ ID NO: 3542 - protein, 7 aa, synthetic construct
YDSDRPS

SEQ ID NO: 3543 - protein, 7 aa, synthetic construct
QDSKRPS

SEQ ID NO: 3544 - protein, 7 aa, synthetic construct
QDSKRPS

SEQ ID NO: 3545 - protein, 7 aa, synthetic construct
RDSNRPS

SEQ ID NO: 3546 - protein, 7 aa, synthetic construct
KDSERPS

SEQ ID NO: 3547 - protein, 7 aa, synthetic construct
EDSKRPS

SEQ ID NO: 3548 - protein, 7 aa, synthetic construct
DTSNKHS

SEQ ID NO: 3549 - protein, 7 aa, synthetic construct
EVSNRPS

SEQ ID NO: 3550 - protein, 7 aa, synthetic construct
EVSKRPS

SEQ ID NO: 3551 - protein, 7 aa, synthetic construct
GNSNRPS

SEQ ID NO: 3552 - protein, 7 aa, synthetic construct
DVSKRPS

SEQ ID NO: 3553 - protein, 7 aa, synthetic construct
FDSDRPS

SEQ ID NO: 3554 - protein, 7 aa, synthetic construct
EVSNRPS

SEQ ID NO: 3555 - protein, 7 aa, synthetic construct
EDSKRPS

SEQ ID NO: 3556 - protein, 7 aa, synthetic construct
KDSERPS

SEQ ID NO: 3557 - protein, 7 aa, synthetic construct
KDSERPS

SEQ ID NO: 3558 - protein, 7 aa, synthetic construct
KDSERPS

SEQ ID NO: 3559 - protein, 7 aa, synthetic construct
EDSKRPS

SEQ ID NO: 3560 - protein, 7 aa, synthetic construct
EVSNRPS

SEQ ID NO: 3561 - protein, 7 aa, synthetic construct
EVSNRPS

SEQ ID NO: 3562 - protein, 7 aa, synthetic construct
EDSKRPS

SEQ ID NO: 3563 - protein, 7 aa, synthetic construct
GVSNRPS

SEQ ID NO: 3564 - protein, 11 aa, synthetic construct
YKSDSDKQQGS

SEQ ID NO: 3565 - protein, 7 aa, synthetic construct
KDSERPS

SEQ ID NO: 3566 - protein, 7 aa, synthetic construct
KDSERPS

SEQ ID NO: 3567 - protein, 7 aa, synthetic construct
EDSKRPS

SEQ ID NO: 3568 - protein, 7 aa, synthetic construct
EDSKRPS

SEQ ID NO: 3569 - protein, 7 aa, synthetic construct
GKNNRPS

SEQ ID NO: 3570 - protein, 7 aa, synthetic construct
GKNNRPS

SEQ ID NO: 3571 - protein, 7 aa, synthetic construct
EDSKRPS

SEQ ID NO: 3572 - protein, 7 aa, synthetic construct
EDSKRPS

SEQ ID NO: 3573 - protein, 7 aa, synthetic construct
DVIKRPS

SEQ ID NO: 3574 - protein, 7 aa, synthetic construct
EVSKRPS

SEQ ID NO: 3575 - protein, 7 aa, synthetic construct
EVIYRPS

SEQ ID NO: 3576 - protein, 7 aa, synthetic construct
GNSNRPS

SEQ ID NO: 3577 - protein, 7 aa, synthetic construct
DVSKRPS

SEQ ID NO: 3578 - protein, 7 aa, synthetic construct
DVSKRPS

SEQ ID NO: 3579 - protein, 7 aa, synthetic construct
GKNNRPS

SEQ ID NO: 3580 - protein, 7 aa, synthetic construct
KDSERPS

SEQ ID NO: 3581 - protein, 7 aa, synthetic construct
EVSHRPS

SEQ ID NO: 3582 - protein, 7 aa, synthetic construct
EVSNRPS

SEQ ID NO: 3583 - protein, 7 aa, synthetic construct
DVTTRPS

SEQ ID NO: 3584 - protein, 7 aa, synthetic construct
EVSNRPS

SEQ ID NO: 3585 - protein, 7 aa, synthetic construct
EVSNRPS

SEQ ID NO: 3586 - protein, 7 aa, synthetic construct
EVSKRPS

SEQ ID NO: 3587 - protein, 7 aa, synthetic construct
EVSKRPS

SEQ ID NO: 3588 - protein, 7 aa, synthetic construct
EVSNRPS

SEQ ID NO: 3589 - protein, 7 aa, synthetic construct
QDSKRPS

SEQ ID NO: 3590 - protein, 7 aa, synthetic construct
KDSERPS

SEQ ID NO: 3591 - protein, 7 aa, synthetic construct
EDSKRPS

SEQ ID NO: 3592 - protein, 7 aa, synthetic construct
GKNNRPS

SEQ ID NO: 3593 - protein, 7 aa, synthetic construct
EVSNRPS

SEQ ID NO: 3594 - protein, 7 aa, synthetic construct
GNSNRPS

SEQ ID NO: 3595 - protein, 7 aa, synthetic construct
QDSKRPS

SEQ ID NO: 3596 - protein, 7 aa, synthetic construct
QGSKRPS

SEQ ID NO: 3597 - protein, 7 aa, synthetic construct
GKNNRPS

SEQ ID NO: 3598 - protein, 7 aa, synthetic construct
QDNKRPS

SEQ ID NO: 3599 - protein, 7 aa, synthetic construct
GKNNRPS

SEQ ID NO: 3600 - protein, 7 aa, synthetic construct
GKDNRPS

SEQ ID NO: 3601 - protein, 7 aa, synthetic construct
GKNNRPS

SEQ ID NO: 3602 - protein, 7 aa, synthetic construct
EDSKRPS

SEQ ID NO: 3603 - protein, 7 aa, synthetic construct
EDSKRPS

SEQ ID NO: 3604 - protein, 7 aa, synthetic construct
EDSKRPS

SEQ ID NO: 3605 - protein, 7 aa, synthetic construct
EDIKRPS

SEQ ID NO: 3606 - protein, 7 aa, synthetic construct
DVSKRPS

SEQ ID NO: 3607 - protein, 7 aa, synthetic construct
DVSKRPS

SEQ ID NO: 3608 - protein, 7 aa, synthetic construct
EVSKRPS

SEQ ID NO: 3609 - protein, 7 aa, synthetic construct
EVSNRPS

SEQ ID NO: 3610 - protein, 7 aa, synthetic construct
QDSKRPS

SEQ ID NO: 3611 - protein, 7 aa, synthetic construct
QDSKRPS

SEQ ID NO: 3612 - protein, 7 aa, synthetic construct
KDSERPS

SEQ ID NO: 3613 - protein, 7 aa, synthetic construct
EDSERPS

SEQ ID NO: 3614 - protein, 7 aa, synthetic construct
EDSKRPS

SEQ ID NO: 3615 - protein, 7 aa, synthetic construct
EDSKRPS

SEQ ID NO: 3616 - protein, 7 aa, synthetic construct
GKNNRPS

SEQ ID NO: 3617 - protein, 7 aa, synthetic construct
GKNNRPS

SEQ ID NO: 3618 - protein, 7 aa, synthetic construct
GKNNRPS

SEQ ID NO: 3619 - protein, 7 aa, synthetic construct
EDSKRPS

SEQ ID NO: 3620 - protein, 7 aa, synthetic construct
GKNNRPS

SEQ ID NO: 3621 - protein, 7 aa, synthetic construct
GKNNRPS

SEQ ID NO: 3622 - protein, 7 aa, synthetic construct
GKNNRPS

SEQ ID NO: 3623 - protein, 7 aa, synthetic construct
GQNNRPS

SEQ ID NO: 3624 - protein, 7 aa, synthetic construct
GKNNRPS

SEQ ID NO: 3625 - protein, 7 aa, synthetic construct
HDDLLPS

SEQ ID NO: 3626 - protein, 7 aa, synthetic construct
DVSKRPS

SEQ ID NO: 3627 - protein, 7 aa, synthetic construct
DNSDRPS

SEQ ID NO: 3628 - protein, 7 aa, synthetic construct
GNSNRPS

SEQ ID NO: 3629 - protein, 7 aa, synthetic construct
GNSNRPS

SEQ ID NO: 3630 - protein, 11 aa, synthetic construct
YKSDSDKHQDS

SEQ ID NO: 3631 - protein, 11 aa, synthetic construct
YKSDSDKQQGS

SEQ ID NO: 3632 - protein, 7 aa, synthetic construct
QDRKRPS

SEQ ID NO: 3633 - protein, 7 aa, synthetic construct
EDSKRPS

SEQ ID NO: 3634 - protein, 7 aa, synthetic construct
GKNNRPS

SEQ ID NO: 3635 - protein, 7 aa, synthetic construct
QDSKRPS

SEQ ID NO: 3636 - protein, 7 aa, synthetic construct
GKNNRPS

SEQ ID NO: 3637 - protein, 7 aa, synthetic construct
EDSKRPS

SEQ ID NO: 3638 - protein, 7 aa, synthetic construct
EDSKRPS

SEQ ID NO: 3639 - protein, 7 aa, synthetic construct
EDSKRPS

SEQ ID NO: 3640 - protein, 7 aa, synthetic construct
GNSNRPS

SEQ ID NO: 3641 - protein, 11 aa, synthetic construct
YKSDSDKQQGS

SEQ ID NO: 3642 - protein, 7 aa, synthetic construct
QDSKRPS

SEQ ID NO: 3643 - protein, 7 aa, synthetic construct
GKNNRPS

SEQ ID NO: 3644 - protein, 7 aa, synthetic construct
EDSKRPS

SEQ ID NO: 3645 - protein, 7 aa, synthetic construct
EDSKRPS

SEQ ID NO: 3646 - protein, 7 aa, synthetic construct
YNRDRPS

SEQ ID NO: 3647 - protein, 7 aa, synthetic construct
SNNQRPS

SEQ ID NO: 3648 - protein, 7 aa, synthetic construct
EVSKRPS

SEQ ID NO: 3649 - protein, 7 aa, synthetic construct
EVSKRPS

SEQ ID NO: 3650 - protein, 7 aa, synthetic construct
QDNKRPS

SEQ ID NO: 3651 - protein, 7 aa, synthetic construct
QDIKRPS

SEQ ID NO: 3652 - protein, 7 aa, synthetic construct
QDSMRPS

SEQ ID NO: 3653 - protein, 7 aa, synthetic construct
QDSKRPS

SEQ ID NO: 3654 - protein, 7 aa, synthetic construct
EDSKRPS

SEQ ID NO: 3655 - protein, 7 aa, synthetic construct
EDSKRPS

SEQ ID NO: 3656 - protein, 7 aa, synthetic construct
FNNQRPS

SEQ ID NO: 3657 - protein, 7 aa, synthetic construct
STSNKHS

SEQ ID NO: 3658 - protein, 7 aa, synthetic construct
DVSKRPS

SEQ ID NO: 3659 - protein, 7 aa, synthetic construct
TDCERPS

SEQ ID NO: 3660 - protein, 7 aa, synthetic construct
GKNNRPS

SEQ ID NO: 3661 - protein, 7 aa, synthetic construct
EDSKRPS

SEQ ID NO: 3662 - protein, 7 aa, synthetic construct
EVSKRPS

SEQ ID NO: 3663 - protein, 7 aa, synthetic construct
SSNQRPS

SEQ ID NO: 3664 - protein, 7 aa, synthetic construct
RDSDRPS

SEQ ID NO: 3665 - protein, 7 aa, synthetic construct
GKNNRPS

SEQ ID NO: 3666 - protein, 7 aa, synthetic construct
EDSKRPS

SEQ ID NO: 3667 - protein, 7 aa, synthetic construct
DVSKRPS

SEQ ID NO: 3668 - protein, 7 aa, synthetic construct
DVSKRPS

SEQ ID NO: 3669 - protein, 11 aa, synthetic construct [sequence omitted]

SEQ ID NO: 3670 - protein, 12 aa, synthetic construct [sequence omitted]

SEQ ID NO: 3671 - protein, 12 aa, synthetic construct [sequence omitted]

SEQ ID NO: 3672 - protein, 12 aa, synthetic construct [sequence omitted]

SEQ ID NO: 3673 - protein, 11 aa, synthetic construct [sequence omitted]

SEQ ID NO: 3674 - protein, 12 aa, synthetic construct [sequence omitted]

SEQ ID NO: 3675 - protein, 13 aa, synthetic construct [sequence omitted]

SEQ ID NO: 3676 - protein, 12 aa, synthetic construct [sequence omitted]

SEQ ID NO: 3677 - protein, 15 aa, synthetic construct [sequence omitted]

SEQ ID NO: 3678 - protein, 13 aa, synthetic construct [sequence omitted]

SEQ ID NO: 3679 - protein, 11 aa, synthetic construct [sequence omitted]

SEQ ID NO: 3680 - protein, 11 aa, synthetic construct [sequence omitted]

SEQ ID NO: 3681 - protein, 11 aa, synthetic construct [sequence omitted]

SEQ ID NO: 3682 - protein, 11 aa, synthetic construct [sequence omitted]

SEQ ID NO: 3683 - protein, 14 aa, synthetic construct [sequence omitted]

SEQ ID NO: 3684 - protein, 11 aa, synthetic construct [sequence omitted]

SEQ ID NO: 3685 - protein, 12 aa, synthetic construct [sequence omitted]

SEQ ID NO: 3686 - protein, 13 aa, synthetic construct [sequence omitted]

SEQ ID NO: 3687 - protein, 13 aa, synthetic construct [sequence omitted]

SEQ ID NO: 3688 - protein, 16 aa, synthetic construct
CCSYAGRSTLGIDWVF

SEQ ID NO: 3689 - protein, 13 aa, synthetic construct [sequence omitted]

SEQ ID NO: 3690 - protein, 12 aa, synthetic construct [sequence omitted]

SEQ ID NO: 3691 - protein, 13 aa, synthetic construct [sequence omitted]

SEQ ID NO: 3692 - protein, 11 aa, synthetic construct [sequence omitted]

SEQ ID NO: 3693 - protein, 12 aa, synthetic construct [sequence omitted]

SEQ ID NO: 3694 - protein, 13 aa, synthetic construct [sequence omitted]

SEQ ID NO: 3695 - protein, 13 aa, synthetic construct [sequence omitted]

SEQ ID NO: 3696 - protein, 12 aa, synthetic construct [sequence omitted]

SEQ ID NO: 3697 - protein, 12 aa, synthetic construct [sequence omitted]

SEQ ID NO: 3698 - protein, 13 aa, synthetic construct [sequence omitted]

SEQ ID NO: 3699 - protein, 12 aa, synthetic construct [sequence omitted]

SEQ ID NO: 3700 - protein, 11 aa, synthetic construct [sequence omitted]

SEQ ID NO: 3701 - protein, 11 aa, synthetic construct [sequence omitted]

SEQ ID NO: 3702 - protein, 11 aa, synthetic construct [sequence omitted]

SEQ ID NO: 3703 - protein, 12 aa, synthetic construct [sequence omitted]

SEQ ID NO: 3704 - protein, 13 aa, synthetic construct [sequence omitted]

SEQ ID NO: 3705 - protein, 13 aa, synthetic construct [sequence omitted]

SEQ ID NO: 3706 - protein, 13 aa, synthetic construct [sequence omitted]

SEQ ID NO: 3707 - protein, 13 aa, synthetic construct [sequence omitted]

SEQ ID NO: 3708 - protein, 13 aa, synthetic construct [sequence omitted]

SEQ ID NO: 3709 - protein, 12 aa, synthetic construct [sequence omitted]

SEQ ID NO: 3710 - protein, 12 aa, synthetic construct [sequence omitted]

SEQ ID NO: 3711 - protein, 12 aa, synthetic construct
CTSYTRNNTYVF

SEQ ID NO: 3712 - protein, 13 aa, synthetic construct [sequence omitted]

SEQ ID NO: 3713 - protein, 13 aa, synthetic construct [sequence omitted]

SEQ ID NO: 3714 - protein, 16 aa, synthetic construct
CCSYAGRSTLGIDWVF

SEQ ID NO: 3715 - protein, 13 aa, synthetic construct [sequence omitted]

SEQ ID NO: 3716 - protein, 13 aa, synthetic construct [sequence omitted]

SEQ ID NO: 3717 - protein, 12 aa, synthetic construct [sequence omitted]

SEQ ID NO: 3718 - protein, 12 aa, synthetic construct [sequence omitted]

SEQ ID NO: 3719 - protein, 12 aa, synthetic construct [sequence omitted]

SEQ ID NO: 3720 - protein, 12 aa, synthetic construct
CISYTNTNTRVF

SEQ ID NO: 3721 - protein, 12 aa, synthetic construct [sequence omitted]

SEQ ID NO: 3722 - protein, 12 aa, synthetic construct [sequence omitted]

SEQ ID NO: 3723 - protein, 13 aa, synthetic construct [sequence omitted]

SEQ ID NO: 3724 - protein, 13 aa, synthetic construct [sequence omitted]

SEQ ID NO: 3725 - protein, 11 aa, synthetic construct [sequence omitted]

SEQ ID NO: 3726 - protein, 11 aa, synthetic construct [sequence omitted]

SEQ ID NO: 3727 - protein, 13 aa, synthetic construct [sequence omitted]

SEQ ID NO: 3728 - protein, 13 aa, synthetic construct [sequence omitted]

SEQ ID NO: 3729 - protein, 12 aa, synthetic construct [sequence omitted]

SEQ ID NO: 3730 - protein, 13 aa, synthetic construct [sequence omitted]

SEQ ID NO: 3731 - protein, 11 aa, synthetic construct [sequence omitted]

SEQ ID NO: 3732 - protein, 11 aa, synthetic construct [sequence omitted]

SEQ ID NO: 3733 - protein, 11 aa, synthetic construct [sequence omitted]

SEQ ID NO: 3734 - protein, 12 aa, synthetic construct [sequence omitted]

SEQ ID NO: 3735 - protein, 13 aa, synthetic construct
CYSRDSSGSLWIF

SEQ ID NO: 3736 - protein, 13 aa, synthetic construct [sequence omitted]

SEQ ID NO: 3737 - protein, 13 aa, synthetic construct [sequence omitted]

SEQ ID NO: 3738 - protein, 13 aa, synthetic construct [sequence omitted]

SEQ ID NO: 3739 - protein, 13 aa, synthetic construct [sequence omitted]

SEQ ID NO: 3740 - protein, 13 aa, synthetic construct [sequence omitted]

SEQ ID NO: 3741 - protein, 13 aa, synthetic construct [sequence omitted]

SEQ ID NO: 3742 - protein, 12 aa, synthetic construct [sequence omitted]

SEQ ID NO: 3743 - protein, 12 aa, synthetic construct [sequence omitted]

SEQ ID NO: 3744 - protein, 12 aa, synthetic construct [sequence omitted]

SEQ ID NO: 3745 - protein, 12 aa, synthetic construct [sequence omitted]

SEQ ID NO: 3746 - protein, 11 aa, synthetic construct [sequence omitted]

SEQ ID NO: 3747 - protein, 11 aa, synthetic construct [sequence omitted]

SEQ ID NO: 3748 - protein, 11 aa, synthetic construct [sequence omitted]

SEQ ID NO: 3749 - protein, 12 aa, synthetic construct
CFSTDSSGNKVF

SEQ ID NO: 3750 - protein, 12 aa, synthetic construct [sequence omitted]

SEQ ID NO: 3751 - protein, 12 aa, synthetic construct [sequence omitted]

SEQ ID NO: 3752 - protein, 13 aa, synthetic construct [sequence omitted]

SEQ ID NO: 3753 - protein, 13 aa, synthetic construct
CNSRDSSYNHWVF

SEQ ID NO: 3754 - protein, 13 aa, synthetic construct [sequence omitted]

SEQ ID NO: 3755 - protein, 13 aa, synthetic construct [sequence omitted]

SEQ ID NO: 3756 - protein, 13 aa, synthetic construct [sequence omitted]

SEQ ID NO: 3757 - protein, 13 aa, synthetic construct [sequence omitted]

SEQ ID NO: 3758 - protein, 13 aa, synthetic construct [sequence omitted]

SEQ ID NO: 3759 - protein, 13 aa, synthetic construct [sequence omitted]

SEQ ID NO: 3760 - protein, 13 aa, synthetic construct [sequence omitted]

SEQ ID NO: 3761 - protein, 13 aa, synthetic construct
CAAWDARLNGWVF

SEQ ID NO: 3762 - protein, 12 aa, synthetic construct [sequence omitted]

SEQ ID NO: 3763 - protein, 13 aa, synthetic construct [sequence omitted]

SEQ ID NO: 3764 - protein, 13 aa, synthetic construct [sequence omitted]

SEQ ID NO: 3765 - protein, 13 aa, synthetic construct [sequence omitted]

SEQ ID NO: 3766 - protein, 11 aa, synthetic construct [sequence omitted]

SEQ ID NO: 3767 - protein, 12 aa, synthetic construct [sequence omitted]

SEQ ID NO: 3768 - protein, 11 aa, synthetic construct [sequence omitted]

SEQ ID NO: 3769 - protein, 13 aa, synthetic construct [sequence omitted]

SEQ ID NO: 3770 - protein, 11 aa, synthetic construct [sequence omitted]

SEQ ID NO: 3771 - protein, 11 aa, synthetic construct [sequence omitted]

SEQ ID NO: 3772 - protein, 13 aa, synthetic construct [sequence omitted]

SEQ ID NO: 3773 - protein, 13 aa, synthetic construct [sequence omitted]

SEQ ID NO: 3774 - protein, 13 aa, synthetic construct [sequence omitted]

SEQ ID NO: 3775 - protein, 13 aa, synthetic construct [sequence omitted]

SEQ ID NO: 3776 - protein, 13 aa, synthetic construct [sequence omitted]

SEQ ID NO: 3777 - protein, 11 aa, synthetic construct [sequence omitted]

SEQ ID NO: 3778 - protein, 11 aa, synthetic construct [sequence omitted]

SEQ ID NO: 3779 - protein, 13 aa, synthetic construct [sequence omitted]

SEQ ID NO: 3780 - protein, 13 aa, synthetic construct [sequence omitted]

SEQ ID NO: 3781 - protein, 13 aa, synthetic construct [sequence omitted]

SEQ ID NO: 3782 - protein, 13 aa, synthetic construct [sequence omitted]

SEQ ID NO: 3783 - protein, 12 aa, synthetic construct [sequence omitted]

SEQ ID NO: 3784 - protein, 12 aa, synthetic construct [sequence omitted]

SEQ ID NO: 3785 - protein, 13 aa, synthetic construct [sequence omitted]

SEQ ID NO: 3786 - protein, 11 aa, synthetic construct [sequence omitted]

SEQ ID NO: 3787 - protein, 11 aa, synthetic construct [sequence omitted]

SEQ ID NO: 3788 - protein, 11 aa, synthetic construct [sequence omitted]

SEQ ID NO: 3789 - protein, 11 aa, synthetic construct [sequence omitted]

SEQ ID NO: 3790 - protein, 13 aa, synthetic construct [sequence omitted]

SEQ ID NO: 3791 - protein, 13 aa, synthetic construct [sequence omitted]

SEQ ID NO: 3792 - protein, 11 aa, synthetic construct [sequence omitted]

SEQ ID NO: 3793 - protein, 11 aa, synthetic construct [sequence omitted]

SEQ ID NO: 3794 - protein, 12 aa, synthetic construct [sequence omitted]

SEQ ID NO: 3795 - protein, 11 aa, synthetic construct
CFSAADNTSVF

SEQ ID NO: 3796 - protein, 13 aa, synthetic construct [sequence omitted]

SEQ ID NO: 3797 - protein, 13 aa, synthetic construct [sequence omitted]

SEQ ID NO: 3798 - protein, 12 aa, synthetic construct [sequence omitted]

SEQ ID NO: 3799 - protein, 13 aa, synthetic construct
CTSWDDSLNTWVF

SEQ ID NO: 3800 - protein, 11 aa, synthetic construct [sequence omitted]

SEQ ID NO: 3801 - protein, 13 aa, synthetic construct [sequence omitted]

SEQ ID NO: 3802 - protein, 13 aa, synthetic construct [sequence omitted]

SEQ ID NO: 3803 - protein, 12 aa, synthetic construct [sequence omitted]

SEQ ID NO: 3804 - protein, 12 aa, synthetic construct [sequence omitted]

SEQ ID NO: 3805 - protein, 121 aa, synthetic construct; identical to SEQ ID NO: 1066

SEQ ID NO: 3806 - protein, 118 aa, synthetic construct
QVQLVESGGGLVKPGGSLRLSCAASGFTFSDYYMTWIRQAPGKGLEWVSYIVSSGNIMYYADSVKGRFTISRDNAKNSLYLQMNSLRAEDTAVYYCARGGPTGYFDYWGQGALVTVSS

SEQ ID NO: 3807 - protein, 120 aa, synthetic construct
QVQLVQSGAEVKKPGASVKVSCKASGYTFTSYGISWVRQAPGQGLEWMGWISAYNGNTNYAQKLQGRVTMTTDTSTSTAYMELRSLRSDDTAVYYCASHSGSYPNWFDPWGQGTLVTVSS

SEQ ID NO: 3808 - protein, 123 aa, synthetic construct
QVQLVQSGAEVKKPGASVKVSCKASGYTFTDYYLHWVRQAPGLGLEWMGWINPNSGVTNFAQKFQDRVTMTRDTSISTAYMELNRLRSDDAAIYYCAKDMAPAVGPEWYFDLWGRGTLVTVSS

SEQ ID NO: 3809 - protein, 119 aa, synthetic construct
QVQLQESGPGLVKPSETLSLTCTVSGGSISSYYWSWIRQPPGKGLEWIGYIYYSGSTNYNPSLKSRVTISVDTSKNQFSLKLSSVTAADTAVYYCARDNNWNDGAFDIWGQGTMVTVSS

SEQ ID NO: 3810 - protein, 107 aa, synthetic construct
DIQLTQSPSFLSASVGDRVTITCRASQGISSYLAWYQQKPGKAPKLLIYAASTLQSGVPSRFSGSGSGTEFTLTISSLQPEDFATYYCQQLNSYPFTFGPGTKVDIK

SEQ ID NO: 3811 - protein, 112 aa, synthetic construct
DIVMTQSPLFLPATPGEPASISCRSTQSLLDSNGYKYLDWYLQKPGQSPQLLIYLGSNRASGVPDRFSGSGSGIDFTLKISRVEPADTGLYYCMQTRQTPLTFGRGTRLEIK

SEQ ID NO: 3812 - protein, 107 aa, synthetic construct
DIRLTQSPSSLSASVGDRVTITCRASQSISSHLNWYQQKPGKAPKLLIYAASSLQSGVPSRFSGSGSGTDFTLTISSLQPEDFATYYCQQSYSTPYTFGQGTKLEIK

SEQ ID NO: 3813 - protein, 107 aa, synthetic construct
EIVLTQSPATLSLSPGERATLSCRASQSIWKYLGWYQQKPGQAPRLIISDASNRATGIPARFSGSGSGTDFTLTISSLEPEDFAVYFCQHRSNWPLTFGGGTKVEIK

SEQ ID NO: 3814 - protein, 107 aa, synthetic construct; identical to SEQ ID NO: 3810

SEQ ID NO: 3815 - protein, 16 aa, synthetic construct
CARFRIVGTTLYFDYW

SEQ ID NO: 3816 - protein, 13 aa, synthetic construct
CARGGPTGYFDYW

SEQ ID NO: 3817 - protein, 15 aa, synthetic construct
CASHSGSYPNWFDPW

SEQ ID NO: 3818 - protein, 18 aa, synthetic construct
CAKDMAPAVGPEWYFDLW

SEQ ID NO: 3819 - protein, 15 aa, synthetic construct
CARDNNWNDGAFDIW

SEQ ID NO: 3820 - protein, 11 aa, synthetic construct [sequence omitted]

SEQ ID NO: 3821 - protein, 11 aa, synthetic construct
CMQTRQTPLTF

SEQ ID NO: 3822 - protein, 11 aa, synthetic construct [sequence omitted]

SEQ ID NO: 3823 - protein, 11 aa, synthetic construct [sequence omitted]

SEQ ID NO: 3824 - protein, 122 aa, synthetic construct
QVQLVQSGAEVKKPGASVKVSCKTSGYTFTSYGISWVRQAPGQGLEWMGWISAYNGNTNYAQKVQGRVTMITDTSTSTAYMELRSLRSDDTAVYYCARAGPGIVAAGSFDYWGQGTLVTVSS

SEQ ID NO: 3825 - protein, 124 aa, synthetic construct
EVQLVESGGGLVQPGGSLRLSCTASGITFSSFWMSWVRQAPGKGLEWVANINQDGSAKYFVDSVKGRFTISRDNAKNSLYLQMNSLRAEDTAVYYCARERGAARHYYYYYMDVWGTGTTVTVSS

SEQ ID NO: 3826 - protein, 122 aa, synthetic construct
EVQLVESGGGLVQPGGSLRLSCAASGFTFSSYWMSWVRQAPGKGLEWVANIKQDGSEKYYVDSVKGRFTISRDNAKNSLYLQMNSLRAEDTAVYYCARGPGVYYYYYYMDVWGKGTTVTVSS

SEQ ID NO: 3827 - protein, 113 aa, synthetic construct
QVHLQQWGAGLLKPSETLSLTCAVYGGSLSGYSWSWIRQTPGKGLEWIGEINHGEYTNYNPSLKSRVTMSVDTSKNQFSLILSSVTAADTAVYHCVREELDHWGQGTLVTVSS

SEQ ID NO: 3828 - protein, 118 aa, synthetic construct
EVQLVESGGGLVQPGGSLRLSCAASGFTFSSYSMNWVRQAPGKGLEWVSYISSSSSTIYYADSVKGRFTISRDNAKNSLYLQMNGLRDEDTAVYYCARKRYRSNLDYWGQGTLVTVSS

SEQ ID NO: 3829 - protein, 118 aa, synthetic construct
EVQLVESGGGLIQPGGSLRLSCAASGFTVSSNYMSWVRQAPGKGLEWVSVIYSGGSTYYADSVKGRFTISRDNSKNTLYLQMNSLRAEDTAVYYCARARIAAPSFDYWGQGTLVTVSS

SEQ ID NO: 3830 - protein, 117 aa, synthetic construct
QVQLVQSGAEVKKPGASVKVSCKASGYTFTSYGISWVRQAPGQGLEWMGWISAYNGNTNYAQKLQGRVTMTTDTSTSTAYMELRSLRSDDTAVYYCARRAARCFDYWGQGTLVTVSS

SEQ ID NO: 3831 - protein, 113 aa, synthetic construct
QVQLVQSGAEVKKPGASVKVSCKASGYTFTSYDINWVRQATGQGLEWMGWMNPNSGNTGYAQKFQGRVTMTRNTSISTAYMELSSLRSEDTAVYYCARGRDYWGQGTLVTVSS

SEQ ID NO: 3832 - protein, 112 aa, synthetic construct
EVQLVESGGGLVQPGGSLRLSCAASGFTFSSYDMHWVRQATGKGLEWVSAIGTAGDTYYPGSVKGRFTISRENAKNSLYLQMNSLRAGDTAVYYCARAFDIWGQGTMVTVSS

SEQ ID NO: 3833 - protein, 120 aa, synthetic construct
QEQLVESGGGVVQPGRSLRLSCAASGFTFSSYGMHWVRQAPGKGLEWVAVIWYDGSNKYYADSVKGRFTISRDNSKNTLYLQMNSLRAEDTAVYYCAREARSSGRGFDYWGQGTLVTVSS

SEQ ID NO: 3834 - protein, 120 aa, synthetic construct
EVQLVESGGGLVQPGGSLRLSCAASGFTFSNYAMSWVRQAPGKGLEWVSGISGSGVSTYYADSVKGRFTISRDNSKNTLYLQMNSLRAEDTAVYYCAKDKWELLRGFDYWGQGTLVTVSS

SEQ ID NO: 3835 - protein, 122 aa, synthetic construct
QLQLQESGPGLVKPSETLSLTCTVSGGSISSSSYYWGWIRQPPGKGLEWIGSIYYSGSTYYNPSLKSRVTISVDTSKNQFSLKLSSVTAADTAVYYCARHKAAAGSYYFDYWGQGTPVTVSS

SEQ ID NO: 3836 - protein, 119 aa, synthetic construct
EVQLVESGGGLVQPGGSLRLSCAASGFTFSSYDMHWVRQATGKGLEWVSAIGIAGDTYYPGSVKGRFTISRENAKNSLYLQMNSLRAGDTTVYYCARDRGRLGGVFDLWGRGTLVTVSS

SEQ ID NO: 3837 - protein, 118 aa, synthetic construct
EVQLVESGGGLVQPGGSLRLSCAASGFTFSSYSMNWVRQAPGKGLEWVSYISSSSSTIYYADSVKGRITISRDNAKNSLYLQMNSLRDEDTAVYYCARKGYSSRWDYWGQGTLVTVSS

SEQ ID NO: 3838 - protein, 113 aa, synthetic construct; identical to SEQ ID NO: 3827

SEQ ID NO: 3839 - protein, 117 aa, synthetic construct
EVQLVESGGGLVKPGGSLRLSCAASGFTFSSYSMNWVRQAPGKGLEWVSSISSSSSYIYYADSVKGRFTISRDNAKNSLYLQMNSLRAEDTAVYYCAREGNWGFDYWGQGTLVTVSS

SEQ ID NO: 3840 - protein, 120 aa, synthetic construct
QVQLVQSGAEVKKPGASVKVSCKASGYTFTSYGISWVRQAPGQGLEWMGWINAYNGNRNYAQKLQGRVTMTTDTSTSTAYMELRSLRSDDTAVYCCARSHNWNYFYFDYWGQGTLVTVSS

SEQ ID NO: 3841 - protein, 121 aa, synthetic construct
QVQLQQSGPGLVKPSQTLSLTCAISGDSVSSNSAAWNWIRQSPSRGLEWLGRTYYRSKWYNDYAVSVKSRITINPDTSKNQFSLQLNSVTPEDTAVYYCARAPVPGWFDPWGQGTLVTVSS

SEQ ID NO: 3842 - protein, 121 aa, synthetic construct
EVQLVESGGGLVKPGGSLRLSCAASGFTFSSYSMNWVRQAPGKGLEWVSSISSSSSYIYYADSVKGRFTISRDNAKNSLYLQMNSLRAEDTAVYYCARGMGAVAEDWFDPWGQGTLVTVSS

SEQ ID NO: 3843 - protein, 114 aa, synthetic construct
EVQLVESGGGLVQPGGSLRLSCAASGFTFSSYWIHWVRQVPGKGLVWVSRINSDGITTSYADSVKGRFTISRDNAKNTLYLQMNSLRAEDTAMYYCASFITGTWGQGTLVTVSS

SEQ ID NO: 3844 - protein, 114 aa, synthetic construct
EVQLVESGGGLVQPGRSLRLSCEASGFTFDDFAMHWVRQAPGKGLEWVSGISWNSGTIGYADSVKGRFSISRDNAKKSLYLQMTSLRAEDTALYYCAKLGFDYWGQGTLVTVSS

SEQ ID NO: 3845 - protein, 115 aa, synthetic construct
DEQLVESGGGLVQPGGSLRLSCAASGFTFSSFAMSWVRQAPGKGLEWVSAIRGTGVSTYYADSVKGRFTISRDNSKNTLYLQMSSLRAEDTAVYYCAKNLFFDYWGQGTLVTVSS

SEQ ID NO: 3846 - protein, 116 aa, synthetic construct
QVQLVESGGGVVQPGRSLRLSCAASGFTFRNSGMHWVRQAPGKGLEWVAVIWYDGSNKYYVDSVKGRFTISRDNSKNTLYLQMNSLRAEDTAVYYCARDNWGIDYWGQGTLVTVSS

SEQ ID NO: 3847 - protein, 116 aa, synthetic construct
EVQLVESGGGLVKPGGSLRLSCAASGFTFSSYSMNWVRQAPGKGLEWVSSISSSSSYIYYADSVKGRFTISRDNAKNSLYLQMNSLRAEDTAVYYCAREVTSFDYWGQGTLVTVSS

SEQ ID NO: 3848 - protein, 117 aa, synthetic construct
EVQLVESGGGLIQPGGSLRLSCAASGLIVSSNYMSWVRQAPGRGLEWVSVLYSGDGTSYADSVKGRFTISRDNSKNTLYLQMNSLRAEDTAVYYCARDNWSSYFDYWGQGTLVTVSS

SEQ ID NO: 3849 - protein, 117 aa, synthetic construct
EVQLVESGGGLIQPGGSLRLSCAASGFTVSSNYMSWVRQAPGKGLEWVSVIYSGGTTYYADSVKGRFTISRDSSKNTLYLQMNSLRAEDTAVYYCARGIAARAFAYWGQGTLVTVSS

SEQ ID NO: 3850 - protein, 115 aa, synthetic construct
QVQLVQSGAEVKKPGASVKVSCKASGYTFTSYGISWVRQAPGQGLEWMGWINTYNNNTNCAQKLQGRVTMTTDTSTSTAYMELRSLRSDDTAVYYCAREGYLDYWGQGTLVTVSS

SEQ ID NO: 3851 - protein, 118 aa, synthetic construct
QVQLVESGGGLVKPGGSLRLSCAASGFTFSDYYMSWIRQAPGKGLEWVSYISGPGNTIYYADSVKGRFTISRDSAINSLYLQMNSLRAEDTALYYCARERNWGGFDYWGQGTLVTVSS

SEQ ID NO: 3852 - protein, 118 aa, synthetic construct
EVQLVESGGGLVQPGGSLRLSCAASGFTFSAYSMNWVRQAPGKGLEWVSYINYRNSATYYADSVKGRFSISRDTAKNSLYLQMNSLRDEDTAVYYCARDYYFYYMDVWGKGTTVTVSS

SEQ ID NO: 3853 - protein, 118 aa, synthetic construct
EVQLVESGGGLVQPGGSLRLSCAASGFTFSSYSMNWVRQAPGKGLEWVSYISSSSSTIYYADSVKGRFTISRDNAKNSLYLQMNSLRDEDTAVYYCARDSSSWYFDYWGQGTLVTVSS

SEQ ID NO: 3854 - protein, 118 aa, synthetic construct
EVQLVESGGGLVKPGGSLRLSCAASGFTFSNAWMSWVRQAPGKGLEWVGRIKSKTDGGTTDYAAPVKGRFTISRDDSKNTLYLQMNSLKTEDTAVYYCTTVNWAFDYWGQGTLVTVSS

SEQ ID NO: 3855 - protein, 118 aa, synthetic construct
QVQLVESGGGLVKPGGSLRLSCAASGFIFSTYYMSWVRQAPGKGLEWVSYISTSGRNIYYADSMNGRFTMSRDNAKNSLYLEMNSLRAEDTAVYYCVRDNWNYGFDHWGQGTLVTVSS

SEQ ID NO: 3856 - protein, 118 aa, synthetic construct
QVQLVESGGGVVQPGRSLRLSCAASGFTFSSYDMHWVRQAPGKGLEWVAVIWYDGSNKYYADSVKGRFTISRDNSKNTLYLQMISLRAEDTAVYYCARGIAAAGLDYWGQGTLVTVSS

SEQ ID NO: 3857 - protein, 118 aa, synthetic construct
EVQLMESGGGLVQPGGSLRLSCAASGFTFSSYWMHWVRQAPGKGLVWVSRINSDGSSTSYADSVKGRFAISRDNAKNTLFLQMNSLRAEDTAVYYCAREDSRNWFDPWGQGTLVTVSS

SEQ ID NO: 3858 - protein, 118 aa, synthetic construct
EVQLVESGGGLVQPGGSLKLSCAASGFTFSGSAMHWVRQASGKGLEWVGRIRSKANSYATAYAASVKGRFTISRDDSKNTAYLQMNSLKTEDTAVYYCTSTGTTFDYWGQGTLVTVSS

SEQ ID NO: 3859 - protein, 118 aa, synthetic construct
EVQLVESGGGLLQPGGSLRLSCAASGFTFSSYSMNWVRQAPGKGLEWVSYISSGSSTIYYADSVKGRFTISRDNAKNSLFLQMNSLRDEDTAVYYCARTSRVAAFDYWGQGTLVTVSS

SEQ ID NO: 3860 - protein, 118 aa, synthetic construct
QVQLVESGGGLVKPGGSLRLSCAASGFTFSDYYMSWIRQAPGKGLEWISYISRRGDIISFADSVQGRFTISRDNAKNSLYLQMNSLRAEDTAVYYCARDDLWITGDYWGQGTPVTVSS

SEQ ID NO: 3861 - protein, 118 aa, synthetic construct
EVQLVESGGGLVQPGGSLRLSCAASGFTFSTYWMHWVRQAPGKGLVWVSRINGDGSSTNYADSVKGRFTISRDNAKNTLYLQMNSLRAEDTAVYYCAREEQRNWFDPWGQGTLVTVSS

SEQ ID NO: 3862 - protein, 119 aa, synthetic construct
EVQLVESGGGLVKPGGSLRLSCAASGFTFSHSGMNWVRRAPGKGLEWVSSISSSSSYIYYADSVKGRFTISRDNAKNSLYLQMNSLRAEDTAVYYCARAYNWNGYFDYWGQGTLVTVSS

SEQ ID NO: 3863 - protein, 118 aa, synthetic construct
EVQLVESGGGLIQPGGSLRLACAASGFTVSGNYMNWVRQAPGKGLEWVSVIYSGGGTYYADSVKGRFTFSSDNSKNTVFLQMNSLRAEDTALYYCARDSGDSYAFDLWGQGTMVTVSS

SEQ ID NO: 3864 - protein, 119 aa, synthetic construct
QVQLQESGPGLVKPSETLSLTCTVSGGSISSYYWSWIRQPPGKGLEWIGYIYYSGSTNYNPSLKSRVTISVDTSKNQFSLKLSSVTAADTAVYYCAREGGDYYYYMDVWGKGTTVTVSS

SEQ ID NO: 3865 - protein, 119 aa, synthetic construct
EVQLVESGGGLVQPGGSLRLSCAASGFTFSSYSMNWVRQAPGKGLEWVSYISSSSSTIYYADSVKGRFTISRDNAKNSLYLQMNSLRDEDTAVYYCARHDILTGYFDYWGQGTLVTVSS

SEQ ID NO: 3866 - protein, 119 aa, synthetic construct
QVQLVQSGAEVKKPGASVKVSCKASGYTFTNYGINWVRQAPGQGLEWMGWISAYSGNTNYARKLQGRVTMTTDTSTITAYMELRSLTSDDTAVYYCAWYSRDWSDFDYWGQGTLVTVSS

SEQ ID NO: 3867 - protein, 119 aa, synthetic construct
QVQLQESGPGLVKPSGTLSLTCAVSGGSISSNNWWSWVRQPPGKGLEWIGEIYHSGSTNYNPSLKSRVTISVDKSKNQFSLKLSSVTAADTAVYYCARDRRELRAFDIWGQGTMVTVSS

SEQ ID NO: 3868 - protein, 118 aa, synthetic construct
QVQLQQSGPGLVKPSQTLSLTCAISGDSVSSNSAAWNWIRQSPSRGLEWLGRTYYRSKWYNDYAVSVKSRITINPDTSKNQFSLQLNSVTPEDTAVYYCARGGFFDYWGQGTLVTVSS

SEQ ID NO: 3869 - protein, 119 aa, synthetic construct
EVQLVESGGGLVQPGGSLRLSCAASGFTFSSYNMHWVRQPTGKGLEWVSAIGTAGDAYYPGSVKGRFTISRENARNSLFLQMNSLRAGDTAVYYCTGGSDSSHWYFDIWGRGTLVTVSS

SEQ ID NO: 3870 - protein, 119 aa, synthetic construct
ELQLVESGGGLVQPGGSLRLSCAASGFTFSSYSMNWVRQAPGKGLEWVSYISSSSSTIFYADSVRGRFTISRDNAKNSLYLQMNSLRDEDTAVYSCARRAWGYWYFDLWGRGTLVTVSS

SEQ ID NO: 3871 - protein, 125 aa, synthetic construct
QVQLVQSGTEVKKPGASVKVSCKASGYTFTGYYIHWVRQAPVRQAPGQGLEWMGWIYPNRGGTSFAQKFQGRVTMTRDSSISTAYMELSGLSSDDTAVYYCARAYSSSWTPLGYWGQGTLVTVSS

SEQ ID NO: 3872 - protein, 119 aa, synthetic construct
QVQLQESGPGLVKPSETLSLTCTVSGGSVSSANYYWTWIRQPPGKGLEWIGYIYYSGSTNYNPSLKSRVSMSVDTSTNQFSLKLSSVTAADTAVYYCARTDFWSGWDYWGQGTLVTVSS

SEQ ID NO: 3873 - protein, 120 aa, synthetic construct
EVQLVESGGGLVQPGGSLRLSCAASGFTFNTYSVNWVRQAPGKGLEWVSYISSGSSTIYYADSVKGRFTVSRDNAKNSVYLQMNSLRDEDTAVYYCARSGYRYPFHFDYWGQGTLVTVSS

SEQ ID NO: 3874 - protein, 120 aa, synthetic construct
QVQLVQSGAEVKKPGASVQVSCKASGYTFTNYDINWVRQATGQGLEWMGWMNPNSGNTGYAPKFQGRVTMTRNTSIRTAYMELSSLRSEDTAVYYCAIDGLGQLVLFDYWGQGTLVTVSS

SEQ ID NO: 3875 - protein, 120 aa, synthetic construct
EVQLVESGGGLVKPGGSLRLSCAASGFTFSRYSMNWVRQAPGKGLEWVSSISSSSSYIYYADSVKGRFTISRDNAKNSLYLQMTSLRAEDTAVFYCAREGGIAAAGFDYWGQGTLVTVSS

SEQ ID NO: 3876 - protein, 120 aa, synthetic construct
EVQLVESGGNLVQPGGSLRLSCAASGFTFSSYSMNWVRQAPGKGLEWVSYISSSSSTIYYADSVKGRFTISRDNAKNSLYLQMNSLRDEDTAVYYCARSGYRYPYYFDYWGQGTLVTVSS

SEQ ID NO: 3877 - protein, 121 aa, synthetic construct
EVQLVESGGGLVKPGGSLRLSCAASGFTFINAWMSWVRQAPGKGLEWVGRIKSETDGGTTDYAAPVKGRFTISRDDSKNTLYLQMNSLKTEDTAVYYCTTDNWNYEDFDYWDQGTLVTVSS

SEQ ID NO: 3878 - protein, 120 aa, synthetic construct
EVQLVESGGHVIRPGGSLRLSCAASGFTFDDYGMSWVRQVPGKGLEWVSDISWNGGSTGYADSVKGRFTISRDNAKNSLYLQMNSLRAEDTALYYCAREPQQWRYYFDYWGQGTLVTVSS

SEQ ID NO: 3879 - protein, 121 aa, synthetic construct
EVQLVESGGGLVQPGGSLRLSCAASGFTFSSYAMSWVRQAPGKGLEWVSAISGSGGSTYYADSVKGRFTISRDNSKNTLYLQMNSLRAEDTAVYYCAKARSGIVGATGDYWGQGTLVTVSS

SEQ ID NO: 3880 - protein, 120 aa, synthetic construct
EVQLVESGGGLVKPGGSLRLSCAASGFTFSSYSMNWVRQAPGKGLEWVSSISSSSSYIYYADSVKGRFTISRDNAKNSLYLQMNSLRAEDTAVYYCARGGNWNSDAFDIWGQGTMVTVSS

SEQ ID NO: 3881 - protein, 121 aa, synthetic construct
QVQLVQSGAEVKKPGSSVKVSCKPSGGTFNNYAVTWVRQAPGQGLEWMGGIIPIFGTANYAQKFQGRVTFTADESTSTAYMELSSLRSEDTAVYYCARDRSGTTSWYFDLWGRGTLVTVSS

SEQ ID NO: 3882 - protein, 122 aa, synthetic construct
QVQLQESGPGLVKPSQTLSLTCTVSGGSISSGGYYWSWIRQHPGKGLEWIGYSSYSGSTYYNPSLKSRVIISVDTSKNQFSLKLSSVTAADTAVYCCARYCSSTSCYGFDPWGQGILVTVSS

SEQ ID NO: 3883 - protein, 121 aa, synthetic construct
EVQLVQSGAEVKKPGESLKISCKGSGYSFTSYWIGWVRQMPGKGLEWMGIIYPGDSDTRYSPSFQGQVTISADKSISTAYLQWSSLKASDTAMYYCARTEYSSSPEYFQHWGQGTLVTVSS

SEQ ID NO: 3884 - protein, 122 aa, synthetic construct
QVQLVESGGGLVKPGGSLRLSCAASGFTFSDYYMSWIRQAPGKGLEWVSYISSSGSSIFYADSVKARFTISRDNAKNSLYLQVNSLRAEDTAVYYCAREGFWSGYYDAFDIWGQGTMVTVSS

SEQ ID NO: 3885 - protein, 121 aa, synthetic construct
QITLKESGPTLVKPTQTLTLTCTFSGFSLSTSGVGVGWIRQPPGKALEWLALIYWNDDKRYSPSLKSRLTITKDTSKNQVVLTMTNMDPVDTATYYCAHRGSGARDAFDIWGQGTMVTVSS

SEQ ID NO: 3886 - protein, 121 aa, synthetic construct
QVQLQQSGPGLVKPSQTLSLTCAISGDSVSSHSGAWNWLRQSPSRGLEWLGRTYYRSKWYNDYAVSVKSRITINPDTSKNQFSLQLNSVTPEDTAVYYCARDGWTDAFDIWGQGTMVTVSS

SEQ ID NO: 3887 - protein, 121 aa, synthetic construct
QVQLVQSGAEVKKPGASVKVSCKASGYTFTSYYMHWVRQAPGQGLEWMGIINPSGGSTSYAQKFQGRVTMTRDTSTSIVYMELSSLRSEDTAVYYCARESGYSGYDDFDYWGQGTLVTVSS

SEQ ID NO: 3888 - protein, 122 aa, synthetic construct
QVQLVESGGGVVQPGRSLRLSCAASGFTFSSYGMHWVRQAPGKGLEWVAVIWYDGSNKYYADSVKGRFTISRDNSKNTLYLQMNSLRAEDTAVYYCARKAVAGYYYYYMDVWGKGTTVTVSS

SEQ ID NO: 3889 - protein, 121 aa, synthetic construct
EVQLVESGGGLVQPGGSLRLSCAASGFTFSSYSMNWVRQAPGKGLEWVSYISSSSYTIYYADSVKGRFTISRDNAKNSLYLQMNSLRDEDTAVYYCARDVGGNYYYNMDVWGKGTTVTVSS

SEQ ID NO: 3890 - protein, 122 aa, synthetic construct
QVQLQESGPGLVKPSGTLSLTCAVSGGSISSSNWWSWVRQPPGKGLEWIGEIYHSGSTNYNPSLKSRVTISVDKSKNQFSLKLSSVTAADTAVYYCARGQQLVDYYYYMDVWGKGTTVTVSS

SEQ ID NO: 3891 - protein, 121 aa, synthetic construct
EVQVVESGGGLVQPGGSLRLSCAASGFTFSSYAMSWVRQAPGKGLEWVSTISGSGGSTYYADSVKGRFTISRDNSKNTLYLQMNSLRAEDTAVYYCAKERGTVVYGYFDLWGRGTLVTVSS

SEQ ID NO: 3892 - protein, 122 aa, synthetic construct
EVQLVQSGAEVKKPGESLKISCKGSGYSFTSYWIGWVRQMPGKGLEWMGIIYPGDSDTRYSPSFQGQVTISADKSISTAYLQWSSLKASDTAMYYCARHRVTGTTFYYMDVWGKGTTVTVSS

SEQ ID NO: 3893 - protein, 121 aa, synthetic construct
EVQLVQSGAEVKKPGESLKISCKGSGYSFTIYWIGWVRQMPGKGLEWMGIIYPGDSDTTYSPSFQGQVTISADKSISTAYLQWTSLKASDTAMYYCARQDRYNWNSPLDFWGQGTLVTVSS

SEQ ID NO: 3894 - protein, 121 aa, synthetic construct
QVQLQESGPGLVKPSQTLSLTCTVSGGSISSGGYYWSWIRQHPGKGLEWIGYIYYSGSTYYNPSLKSRVTISVDTSKNQFSLKLSSVTVADTAVYYCATLRGYTYGPFDYWGQGALVTVSS

SEQ ID NO: 3895 - protein, 124 aa, synthetic construct
QVQLVQSGSELKKPGASMKVSCKASGYTFTNYAMNWVRQAPGQGLEWMGWINTNTGNPTYAQGFTGRFVFSLDTSVSTTYLQISSLKAEDTAVYYCARDVYSNSHYSYFYMDVWGKGTTVTVSS

SEQ ID NO: 3896 - protein, 122 aa, synthetic construct
QVQLVQSGSELKKPGASVKVSCKASGYTFTHNAMNWVRQAPGQGLEWMGWINTNTGNPTYAQGFTGRFVFSLDTSVRMTYLQISSLKAEDTAVYYCARDSLPDYGDFYLDNWGQGTLVTVSS

SEQ ID NO: 3897 - protein, 118 aa, synthetic construct
QVQLQQWGAGLLKPSETLSLTCAVYGGSFRGYYWDWIRQPPGKGLEWIGEINHGGGTDYNPSLESRVTISVDTSKNQLSLNLNSVTAADTAVYYCVRERGYTDAFDIWGQGTMVTVSS

SEQ ID NO: 3898 - protein, 122 aa, synthetic construct
EVQLVESGGGLVQPGRSLRLSCAASGFTFDDYAMHWVRQVPGKGLEWVSGISWNSDNIGYADSVKGRFTIFRDNARNSLHLQMNSLRPEDTALYYCAKDISHYVGWWYFDIWGRGSLVTVSS

SEQ ID NO: 3899 - protein, 125 aa, synthetic construct
QVQLVQSGAEVKKPGASVKVSCKASGYTFTGYYMHWVRQAPGQGLEWMGWINPNSGGTNYAQKFQGRVTMTRDTSISTAYMELSRLRSDDTAVYYCARGIAAAGGLYYYYYLDVWGKGTTVTVSS

SEQ ID NO: 3900 - protein, 122 aa, synthetic construct
EVQLVESGGGLVQPGGSLKLSCAASGFTFSGSAMHWVRQASGKGLEWVGRIRSKANSYATAYAASVKGRFTISRDDSKNTAYLQMNSLKTEDTAVYYCTRHLELRGNYFDYWGQGTLVTVSS

SEQ ID NO: 3901 - protein, 125 aa, synthetic construct
VQLQESGPGLVKPSQTLSLTCTVSGGSINSGGYYWSWIRQHPGKGLEWIGYISYIGTTFYNPSLKSRITISVDTSKNQFSLKLSSVTAADTAVYYCASFYGDYVPHYYFYYMDVWGKGTTVTVSS

SEQ ID NO: 3902 - protein, 122 aa, synthetic construct
EVHLVESGGGLVQPGGSLRLSCAASGFSFSDHFMDWVRQAPGKGLEWVGHARNKAYSYTTEYAASVKGRFTISRDDSKNSLYLQMNSLKTEDTAVYYCAREGYNWNYDMDVWGKGTTVTVSS

SEQ ID NO: 3903 - protein, 126 aa, synthetic construct
QVTLRESGPALVKPTQTLTLTCTFSGFSLSTSGVCVSWIRQPPGKALEWLALIDWDDDKYYSTSLKTRLTISKDTSKNQVVLTMTNMDPVDTATYYCARIREYCTNGVCSYYFDYWGQGTLVTVSS

SEQ ID NO: 3904 - protein, 122 aa, synthetic construct
QVQLVQSGAEVKKPGASVKVSCKASGYTFTSYGISWVRQAPGQGLEWMGWISGYNGNTNYVQKLQGRVTMTTDTSTNTAHMELRSLRSDDSAVYYCARDPGGYYYSYNMDVWGKGTTVTVSS

SEQ ID NO: 3905 - protein, 128 aa, synthetic construct
EVQLVESGGGLVKPGGSLRLSCAASGFTFSSYSMNWVRQAPGKGLEWVSSISSSSSYIYYADSVKGRFTISRDNAKNSLYLQMNSLRAEDTAVYYCARGGGYCSSTSCYRYYYYMDVWGKGTTVTVSS

SEQ ID NO: 3906 - protein, 122 aa, synthetic construct
QVQLVQSGAEVKKPGSSVKVSCKASGGTFSSYVITWVRQAPGQGLEWMGGIIPIFGTVKYAQKFQGRVKITADESTSTAYMELSSLRSEDTAVYYCARGYCSSTRCYPFDYWGQGTLVIVSS

SEQ ID NO: 3907 - protein, 122 aa, synthetic construct
EVQLVESGGGLVQPGRSLRLSCEASGFTFDDYVMHWVRQAPGKGLEWVSGISWTSGSVAYADSVKGRFTISRDNAINSLYLQMNSLRAEDTAMYYCAKDMGFLEWLSYFDYWGQGTLVTVSS

SEQ ID NO: 3908 - protein, 122 aa, synthetic construct
QIHLVESGGGVVQPGRSLRLSCAASGFTFSNYGLHWVRQAPGKGLEWVAVIWYDGSNKYYADSVKGRFTISRDNSKNTLYLQMNSLRAEDTAVYYCARGPRYNWNYGAFDYWGQGTLVTVSS

SEQ ID NO: 3909 - protein, 123 aa, synthetic construct
QVQLVQSGAEVKKPGASVKVSCKASGYTFTSYGISWVRQAPGQGLEWMGWISAYNGNTNYAQKLQGRVTMTTDTSTSTAYMELRSLRSDDTAVYYCARGGLELRKLYYYMDVWGKGTTVTVSS

SEQ ID NO: 3910 - protein, 123 aa, synthetic construct
EVQLVESGGGLVQPGGSLKLSCAASGFTFSGSAMHWVRQASGKGLEWVGRIRSKANSYATAYAASVKGRFTISRDDSKNTAYLQMNSLKTEDTAVYYCARDGFWSGYDWFDPWGQGTLVTVSS

SEQ ID NO: 3911 - protein, 123 aa, synthetic construct
QVQLVQSGAEVKKPGASVKVSCKASGYTFPHYGVSWVRQAPGQGLEWMGWISAYNGNTDYAQKLQGRVTMTTDTSTSTAYMELRSLRSDDTAVYYCARGNRDYWDYYYYMDVWGKGTTVTVSS

SEQ ID NO: 3912 - protein, 124 aa, synthetic construct; identical to SEQ ID NO: 3895

SEQ ID NO: 3913 - protein, 124 aa, synthetic construct
QVQLVQSGAEVKKPGASVKVSCKASGYTFTSYDIHWVRQATGQGLEWMGWMNPNSGNTGYVQKFQGRVTMTRNTSTRTAYMELSSLISEDTAVYYCARDDFWSGYYKLNGFDIWGQGTMVTVSS

SEQ ID NO: 3914 - protein, 124 aa, synthetic construct
QVQLQESGPGLVKPSETLSLTCTVSGDSVSSGSYFWSWIRQPPGKGLEWIGYFYYSGNTNYNPSLKSRVSMSVDTSKNQFSLKLSSVTAADTAVYYCARDNWNSHYYYYYMDVWGKGTTVTVSS

SEQ ID NO: 3915 - protein, 118 aa, synthetic construct
QVQLQQWGAGLLKPSETLSLTCAVYGGSFSGYYWSWIRQPPGKGLEWIGEINHSGSTNYNPSLKSRVTISVDTSKNQFSLKLSSVTAADTAVYYCAGSWGELLYFDYWGQGTLVTVSS

SEQ ID NO: 3916 - protein, 124 aa, synthetic construct
QVQLQQSGPGLVKPSQTLSLTCAISGDSVSSNSAAWNWIRQSPSRGLEWLGRTYYRSKWYNDYAVSVISRRTIIPDTSQNQFSLQLNSVTPEDTAVYYCARGNVGPAGYHFDYWGQGTLVTVSS

SEQ ID NO: 3917 - protein, 126 aa, synthetic construct
QVQLQESGPGLVKPSETLSLTCTVSGGSVSSGTYYWSWIRQPPGKGLEWIGYIYYSGSTNYNPSLKSRVTISVDSSKNQFSLKLSSVTAADTAVYYCARDRSSWYDHYYYYYMDVWGKGTTVTVSS

SEQ ID NO: 3918 - protein, 126 aa, synthetic construct
EVQLVESGGGLVQPGGSLRLSCAASGFTFSSYSMNWVRQAPRKGLEWILYISSSSSTIYYADSVKGRFTISRDNAKNSLYLQMNSLRDEDTAVYYCARGAYDYVWGNYRHDVFDIWGQGTMVTVSS

SEQ ID NO: 3919 - protein, 127 aa, synthetic construct
QITLKESGPTLVKPTQTLTLTCTFSGFSLSTSGVGVGWIRQPPGKALEWLALIYWNDDKRYSPSLKSRLTITKDTSKNQVVLTMTNMDPVDTATYYCAHKYCGGDCYYYYYYYMDVWGKGTTVTVSS

SEQ ID NO: 3920 - protein, 123 aa, synthetic construct
QLQLQESGPGLVKPSETLSLTCTVSGGSISSSSYYWGWIRQPPGKGLEWIGSIYYSGSTYYNPSLKSRVTISVDTSKNQFSLKLSSVTAADTAVYYCARTPITGTTYWYFDLWGRGTLVTVSS

SEQ ID NO: 3921 - protein, 125 aa, synthetic construct
QLQLQESGPGLVKPSETLSLTCTVSGGSISSSSYYWGWIRQPPGKGLEWIGTIYFSGSTYYNPSLKSRVTISVDTSKTQFSLKLSSVTAADTALYYCARKYYDILTGYFNPFDYWGQGTLVTVSS

SEQ ID NO: 3922 - protein, 107 aa, synthetic construct [sequence omitted]

SEQ ID NO: 3923 - protein, 108 aa, synthetic construct
SYELTQPPSVSVSPGQTARITCSGDALPKKYAYWYQQKSGQAPVLVIYEDSKRPSGIPERFSGSSSGTMATLTISGAQVEDEADYYCYSTDSSGNHYVFGTGTKVTVL

SEQ ID NO: 3924 - protein, 107 aa, synthetic construct
EIVMTQSPATLSVSPGERATLSCRASQSVSSNLAWYQQKPGQAPRLLIYGASTRATGIPARFSGSGSGTEFTLTISSLQSEDFAVYYCQQYNNWPITFGQGTRLEIK

SEQ ID NO: 3925 - protein, 109 aa, synthetic construct; identical to SEQ ID NO: 714

SEQ ID NO: 3926 - protein, 107 aa, synthetic construct
DIQMTQSPSSLSASVGDRVTITCQASQDISNYLNWYQQKPGKAPKLLIYDASNLETGVPSRFSGSGSGTDFTFTISSLQPEDIATYYCQQYDNLPFTFGPGTKVDIK

SEQ ID NO: 3927 - protein, 110 aa, synthetic construct; identical to SEQ ID NO: 404

SEQ ID NO: 3928 - protein, 111 aa, synthetic construct; identical to SEQ ID NO: 1024

SEQ ID NO: 3929 - protein, 111 aa, synthetic construct; identical to SEQ ID NO: 491

SEQ ID NO: 3930 - protein, 112 aa, synthetic construct
DVVMTQSPLSLPVTLGQPASISCRSSQSLVYSDGNTYLNWFQQRPGQSPRRLIYKVSNRDSGVPDRFSGSGSGTDFTLKISRVEAEDVGVYYCMQGTHWPLTFGGGTKVEIK

SEQ ID NO: 3931 - protein, 112 aa, synthetic construct
DVVMTQSPLSLPVTLGQPASISCRSSQSLVYSDGNTYLNWFQQRPGQSPRRLIYKVSNRDSGVPDRFSGSGSGTDFTLKISRVEAEDVGVYYCMQGTHWPRTFGQGTKVEIK

SEQ ID NO: 3932 - protein, 106 aa, synthetic construct
EIVLTQSPATLSLSPGERATLSCRASQSVSSYLAWYQQKPGQAPRLLIYDASNRATGIPARFSGSGSGTDFTLTISSLEPEDFAVYYCQQRSNWYTFGQGTKLEIK

SEQ ID NO: 3933 - protein, 107 aa, synthetic construct
SYELTQPPSVSVSPGQTARITCSGDALPKKYAYWYQQKSGQAPVLVIYEDSKRPSGIPERFSGSSSGTMATLTISGAQVEDEADYYCYSTDSSGNQVFGGGTKLTVL

SEQ ID NO: 3934 - protein, 107 aa, synthetic construct
EIVLTQSPDFQSVTPKEKVTITCRASQSIGSSLHWYQQKPDQSPKLLIKYASQSFSGVPSRFSGSGSGTDFTLTINSLEAEDAATYYCHQSSSLPYTFGQGTKLEIK

SEQ ID NO: 3935 - protein, 107 aa, synthetic construct
DIQMTQSPSSLSASVGDRVTITCRASQGISNYLAWFQQKPGKAPKSLIYAASSLQSGVPSKFSGSGSGTDFTLTISSLQPEDFATYYCQQYNSYPITFGQGTRLEIK

SEQ ID NO: 3936 - protein, 109 aa, synthetic construct; identical to SEQ ID NO: 932

SEQ ID NO: 3937 - protein, 107 aa, synthetic construct
DIQMTQSPSSVSASVGDRVTITCRASQGISSWLAWYQQKPGKAPKLLIYAASSLQSGVPSRFSGSGSGTDFTLTISSLQPEDFATYYCQQANSFPYTFGQGTKLEIK

SEQ ID NO: 3938 - protein, 107 aa, synthetic construct
DIQMTQSPSSVSASVGDRVTITCRASQGISSWLAWYQQKPGKAPKLLIYAASSLQSGVPSRFSGSGSGTDFTLTISSLQPEDFATYYCQQANSFPLTFGGGTKVEIK

SEQ ID NO: 3939 - protein, 110 aa, synthetic construct; identical to SEQ ID NO: 663

SEQ ID NO: 3940 - protein, 108 aa, synthetic construct; identical to SEQ ID NO: 369

SEQ ID NO: 3941 - protein, 108 aa, synthetic construct; identical to SEQ ID NO: 374

SEQ ID NO: 3942 - protein, 107 aa, synthetic construct
DIQMTQSPSSLSASVGDRVTITCRASQGVRNDLGWYQQKPGKVPKRLLYAASRLQSGVPSRFSGTGSGTEFTLTISSLQPEDFATYYCLQHNSYPYTFGQGTKLEIR

SEQ ID NO: 3943 - protein, 110 aa, synthetic construct
QSALTQPASVSGSPGQSITISCTGTSSDVGGYNYVSWYQQHPGKAPKLMIYEVITRPSGVSNRFSGSKSGTTASLTISGLQAEDEADYYCTSYTSTNSVVFGGGTRLTVL

SEQ ID NO: 3944 - protein, 108 aa, synthetic construct; identical to SEQ ID NO: 369

SEQ ID NO: 3945 - protein, 110 aa, synthetic construct; identical to SEQ ID NO: 341

SEQ ID NO: 3946 - protein, 106 aa, synthetic construct; identical to SEQ ID NO: 929

SEQ ID NO: 3947 - protein, 108 aa, synthetic construct; identical to SEQ ID NO: 386

SEQ ID NO: 3948 - protein, 108 aa, synthetic construct; identical to SEQ ID NO: 339

SEQ ID NO: 3949 - protein, 106 aa, synthetic construct
SYELTQPPSVSVSPGQTASITCSGDKLGDKYACWYQQKPGQSPVLVIYQDSKRPSGIPERFSGSNSGNTATLTISGTQAMDEADYYCQAWDSSTWVFGGGTKLTVL

SEQ ID NO: 3950 - protein, 108 aa, synthetic construct; identical to SEQ ID NO: 369

SEQ ID NO: 3951 - protein, 108 aa, synthetic construct; identical to SEQ ID NO: 369

SEQ ID NO: 3952 - protein, 108 aa, synthetic construct; identical to SEQ ID NO: 374

SEQ ID NO: 3953 - protein, 108 aa, synthetic construct
QSVLTQPPSASGTPGQRVTISCSGGSSNIGRNPVYWIQQLPGTAPKLLIYNNDQRPSGVPDRFSGSKSGTSASLAISGLQSEDEADYYCAAWDGRLKVFGGGTKLTVL

SEQ ID NO: 3954 - protein, 108 aa, synthetic construct; identical to SEQ ID NO: 344

SEQ ID NO: 3955 - protein, 108 aa, synthetic construct; identical to SEQ ID NO: 369

SEQ ID NO: 3956 - protein, 108 aa, synthetic construct; identical to SEQ ID NO: 364

SEQ ID NO: 3957 - protein, 109 aa, synthetic construct; identical to SEQ ID NO: 439

SEQ ID NO: 3958 - protein, 107 aa, synthetic construct
DIQMTQSPSSLSASVGDRVTITCRASQGIGNDLGWYQQKAGKAPKRLIYAASNLQSGVPSRFSGSGSGTEFTLTISSLQPEDFATYYCLHHNTHPLTFGGGTKVEIK

SEQ ID NO: 3959 - protein, 110 aa, synthetic construct
QSALTQPPSASGSPGQSVTISCTGTSSDVGGYNYVSWYQQHPGKAPKLMIYEVSKRPSGVPDRFSGSKSGNTASLTVSGLQAEDEADYYCSSYAGSNNLVFGTGTKVTVL

SEQ ID NO: 3960 - protein, 106 aa, synthetic construct; identical to SEQ ID NO: 371

SEQ ID NO: 3961 - protein, 107 aa, synthetic construct
DIQLTQSPSFLSASVGDRVTITCRASQGISSYLAWYQQKPGKAPNLLIYAASTLQSGVPSRFSGSGSGTEFTLTISSLQPEDFAIYYCQQLDSYPLTFGGGTKVDIK

SEQ ID NO: 3962 - protein, 107 aa, synthetic construct
EIVLTQSPATLSLSPGERATLSCRASQSVSSYLAWYQQKPGQAPRLLIYDASNRATGIPARFSGSGSGTDFTLTISSLEPEDFAVYYCQQRSNWPPTFGGGTKVEIK

SEQ ID NO: 3963 - protein, 108 aa, synthetic construct; identical to SEQ ID NO: 369

SEQ ID NO: 3964 - protein, 108 aa, synthetic construct; identical to SEQ ID NO: 369

SEQ ID NO: 3965 - protein, 108 aa, synthetic construct
EIVLTQSPATLSLSPGERATLSCRASQNVNSYLAWYQQKPGQAPRLLIYDASNRATGIPARFSGSGSGTDFTLTISSLEPEDFAVYYCQQRSNWPPWTFGQGTKVEIK

SEQ ID NO: 3966 - protein, 113 aa, synthetic construct
DIVMTQSPDSLAVSLGERATINCKSSQSVLYSSNNKNYLAWYQQKPGQPPKLLIYWASTRESGVPDRFSGSGSGTDFTLTISSLQAEDVAVYYCQQYYSTPLTFGGGTKVEIK

SEQ ID NO: 3967 - protein, 106 aa, synthetic construct
DIQMTQSPSTLSASVGDRVTITCRASQSISRWLAWYQQKPGKAPKLLIYKASSLESGVPSRFSGSGSGTEFTLTVSSLQPDDFATYYCQQYYSYSTFGQGTKLEIK

SEQ ID NO: 3968 - protein, 115 aa, synthetic construct
QAVLTQPASLSASPGASASLTCTLRSGINVGTYRIYWYQQKPGSPPQYLLRYRSDSDKQQGSGVPSRFSGSKDVSANAGILFISGLQSQDEADYYCMIWYSSASVFGGGTKLTVL

SEQ ID NO: 3969 - protein, 106 aa, synthetic construct
SYELTQPLSVSVALGQTARITCGGNNIGSKNVHWYQQKPGQAPVLVIYRDSNRPSGIPERFSGSNSGNTATLTISRAQAGDEADYYCQVWDSSTAVFGGGTKLTVL

SEQ ID NO: 3970 - protein, 111 aa, synthetic construct
QSALTQPASVSGSPGQSITISCTGTSSDVGGYNYVSWYQQHPGKAPKLMIYEVSNRPSGVSNRFSGSKSGNTASLTISGLQAEDEADYYCSSYTSSSTLVVFGGGTKLTVL

SEQ ID NO: 3971 - protein, 106 aa, synthetic construct; identical to SEQ ID NO: 494

SEQ ID NO: 3972 - protein, 108 aa, synthetic construct; identical to SEQ ID NO: 369

SEQ ID NO: 3973 - protein, 108 aa, synthetic construct; identical to SEQ ID NO: 364

SEQ ID NO: 3974 - protein, 108 aa, synthetic construct; identical to SEQ ID NO: 369

SEQ ID NO: 3975 - protein, 107 aa, synthetic construct
DIQMTQSPSSLSASVGDRVTITCRASQRIGSFLNWYQQKPGKAPKLLIYAASNFQSGVPSRFSGSGSGTDFTLTISSLQPEDFATYYCQQTYNTPLTFAGGTKVEIK

SEQ ID NO: 3976 - protein, 110 aa, synthetic construct; identical to SEQ ID NO: 391

SEQ ID NO: 3977 - protein, 110 aa, synthetic construct; identical to SEQ ID NO: 378

SEQ ID NO: 3978 - protein, 112 aa, synthetic construct
DVVMTQSPLSLPVTLGQPASISCRSSQSLVYSDGNTYLNWFQQRPGQSPRRLIYKVSNRDSGVPDRFSGSGSGTDFTLKISRVEAEDVGVYYCMQGTHWPPAFGQGTKLEIK

SEQ ID NO: 3979 - protein, 113 aa, synthetic construct
DIVMTQSPDSLAVSLGERATINCKSSQSVLYSSNNKNYLAWYQQKPGQPPKLLIYWASTRESGVPDRFSGSGSGTDFTLTISSLQAEDVAVYYCQQYYSTALTFGGGTKVEIK

SEQ ID NO: 3980 - protein, 106 aa, synthetic construct
SFDLTQPPSVSVSPGQTASITCSGDKLGDKYACWYQRKPGQSPVLVIYQDSKRPSGIPERFSGSISGNTATLTISGTQAMDEADYYCQAWDSSTAVFGGGTKLTVL

SEQ ID NO: 3981 - protein, 107 aa, synthetic construct
SYELTQPPSVSVSPGQTASITCSGDKLGDKYACWYQQKPGQSPVLVIYQDSKRPSGIPERFSGSNSGNTATLTISGTQAMDEADYYCQAWDSSTALVFGGGTKLTVL

SEQ ID NO: 3982 - protein, 106 aa, synthetic construct; identical to SEQ ID NO: 371

SEQ ID NO: 3983 - protein, 108 aa, synthetic construct; identical to SEQ ID NO: 369

SEQ ID NO: 3984 - protein, 108 aa, synthetic construct; identical to SEQ ID NO: 344

SEQ ID NO: 3985 - protein, 108 aa, synthetic construct; identical to SEQ ID NO: 374

SEQ ID NO: 3986 - protein, 106 aa, synthetic construct
DIQMTQSPSTLSASVGDRVTITCRASQSISSWLAWYQQKPGKAPKLLIYKASSLESGVPSRFSGSGSGTEFTLTISSLQPDDFATYYCQQYNSYWTFGQGTKVEIK

SEQ ID NO: 3987 - protein, 108 aa, synthetic construct; identical to SEQ ID NO: 344

SEQ ID NO: 3988 - protein, 107 aa, synthetic construct
ALQMTQSPSSLSASVGDRVTITCRASQGIRNDLGWYQQKPGKAPKLLIYTASSLQSGVPSRFSGSGSGTDFTLTISSLQPEDFATYYCLQDYNYPYTFGQGTKLEIK

SEQ ID NO: 3989 - protein, 107 aa, synthetic construct
EIVMTQSPATLSVSPGERATLSCRASQSVSSNLAWYQQKPGQAPRLLIYGASTRATGIPARFSGSGSGTDFTLTISSLQSEDFAVYYCQQYDNWPRTFGQGTKVEIK

SEQ ID NO: 3990 - protein, 112 aa, synthetic construct
DIVMTQSPLSLPVTPGEPASISCRSSQSLLHSNGYNYLDWYLQKPGQSPQLLIYLGSNRASGVPDRFSGSGSGTDFTLKISRVEAEDVGVYYCMQSLQTPITFGQGTRLEIK

SEQ ID NO: 3991 - protein, 107 aa, synthetic construct
EIVMTQSPATLSVSPGERATLSCRASQSVSSDLAWYQQKPGQAPRLLIYGATTRATGIPARFSGSGSETEFTLTISSLQSEDFAVYYCQQHNSWPRTFGQGTKVEIK

SEQ ID NO: 3992 - protein, 107 aa, synthetic construct
DIQMTQSPSSVSASVGDRVPITCRASQGISSWLAWYQQKPGKAPKLLIYAASSLQSGVPSRFSGSGSGTDFTLTISSLQPEDFATYYCQQANSFPYTFGQGTKLEIK

SEQ ID NO: 3993 - protein, 108 aa, synthetic construct
SYELTQPPSVSVSPGQTARITCSGDALPKKYAYWYQQKSGQAPVLVIYEDSKRPSGIPERFSGSSSGTMATLTISGAQVEDEADYYCYSTDSSGNLGVFGGGTKLTVL

SEQ ID NO: 3994 - protein, 106 aa, synthetic construct; identical to SEQ ID NO: 371

SEQ ID NO: 3995 - protein, 106 aa, synthetic construct
EIVMTQSPATLSVSPGERATLSCRASQSVSSNLAWYQQKPGQAPRLLIYGASTRATGIPARFSGSGSGTEFTLTISSLQSEDFAVYYCQQYNNWRTFGQGTKVEIK

SEQ ID NO: 3996 - protein, 106 aa, synthetic construct; identical to SEQ ID NO: 494

SEQ ID NO: 3997 - protein, 110 aa, synthetic construct
QSALTQPRSVSGSPGQSVTISCTGTSSDVGGYNYVSWYQQHPGKAPKLIIYDVSKRPSGVPDRFSGSKSGNTASLTISGLQAEDEADYYCCSYADNYTWVFGGGTKLTVL

SEQ ID NO: 3998 - protein, 106 aa, synthetic construct; identical to SEQ ID NO: 371

SEQ ID NO: 3999 - protein, 106 aa, synthetic construct; identical to SEQ ID NO: 371

SEQ ID NO: 4000 - protein, 106 aa, synthetic construct
SYELTQPPSVSVSPGQTASITCSGHMLGYKYASWYHQKPGQSPVLVIYHGTRRPSGIPERFSGSNSGNTSTLTISGTQAMDEADYYCQAWDSTTAVFGGGTKLTVL

SEQ ID NO: 4001 - protein, 106 aa, synthetic construct; identical to SEQ ID NO: 371

SEQ ID NO: 4002 - protein, 108 aa, synthetic construct; identical to SEQ ID NO: 374

SEQ ID NO: 4003 - protein, 108 aa, synthetic construct; identical to SEQ ID NO: 374

SEQ ID NO: 4004 - protein, 108 aa, synthetic construct; identical to SEQ ID NO: 386

SEQ ID NO: 4005 - protein, 107 aa, synthetic construct; identical to SEQ ID NO: 3962

SEQ ID NO: 4006 - protein, 107 aa, synthetic construct
DIQMTQSPSTLSASVGDRVTITCRASQSISSWLAWYQQKPGKAPKLLIYKASSLESGVPSRFSGSGSGTEFTLTITSLQPDDFATYYCQQYNSFSWTFGQGTKVEIK

SEQ ID NO: 4007 - protein, 106 aa, synthetic construct; identical to SEQ ID NO: 371

SEQ ID NO: 4008 - protein, 110 aa, synthetic construct; identical to SEQ ID NO: 391

SEQ ID NO: 4009 - protein, 112 aa, synthetic construct
DIVMTQSPDSLAVSLGERATINCKSSQSVLYSSNNKNYLAWYQQKPGQPPKLLIYWASTRESGVPDRFSGSGSGTDFTLTISSLQAEDVAVYYCQQYYSTRTFGQGTKVEIK

SEQ ID NO: 4010 - protein, 108 aa, synthetic construct; identical to SEQ ID NO: 344

SEQ ID NO: 4011 - protein, 108 aa, synthetic construct; identical to SEQ ID NO: 369

SEQ ID NO: 4012 - protein, 110 aa, synthetic construct
QSVLTQPPSASGTPGQRVTISCSGSSSNIGSNTVNWYQQLPGTAPKLLIYSNNQRPSGVPDRFSGSKSGTSASLAISGLQSEDEADYSCAAWDDSLNGYVFGTGTKVTVL

SEQ ID NO: 4013 - protein, 108 aa, synthetic construct; identical to SEQ ID NO: 369

SEQ ID NO: 4014 - protein, 107 aa, synthetic construct
DIQMTQSPSSLSASVGDRVTITCQASQDISNYLNWYQQKPGKAPKLLIYDASNLETGVPSRFSGSGSGTDFTFTISSLQPEDIATYYCQQYDNLPYTFGQGTKLEIK

SEQ ID NO: 4015 - protein, 108 aa, synthetic construct; identical to SEQ ID NO: 369

SEQ ID NO: 4016 - protein, 107 aa, synthetic construct
DIQMTQSPSSLSASVGDRVTITCRASQDISNSLAWFQQKPGKVPRLLIYAASTLQSGVPSRFSGSGSGTDFTLTISSLQPEDVATYYCQKYNSAPWTFGQGTKVEIK

SEQ ID NO: 4017 - protein, 106 aa, synthetic construct; identical to SEQ ID NO: 371

SEQ ID NO: 4018 - protein, 110 aa, synthetic construct
QSALTQPRSVSGSPGQSVTISCTGTSSDVGGYNYVSWYQQHPGKAPKLMIYDVSKRPSGVPDRFSGSKSGNTASLTISGLQAEDEADYYCCSYAGSYTLVFGGGTKLTVL

SEQ ID NO: 4019 - protein, 108 aa, synthetic construct; identical to SEQ ID NO: 369

SEQ ID NO: 4020 - protein, 118 aa, synthetic construct
EVQLVESGGGLVQPGGSLRLSCAASGFTFSSYSMNWVRQAPGKGLEWVSYISSSSSTIYYADSVKGRFTISRDNADTSLYLQMNSLRDEDTAVYYCARLAARLTFDYWGQGTLVTVSS

SEQ ID NO: 4021 - protein, 123 aa, synthetic construct
QVQLVQSGAEVKKPGASVKVSCKVSGYTLTELSIHWVRQAPGKGLEWMGGFDPEDGETIYAQKFQGRVTMTEDTSTDTAYMDLSSLRSEDTAMYYCTKGFPGIVGATRWLDPWGQGTLVTVSS

SEQ ID NO: 4022 - protein, 126 aa, synthetic construct
EVQLVESGGGLVQPGGSLRLSCAASGFTFSNYAMSWVRQAPGKGLDWVSAISGSGVSTYYADSVKGRFTISRDNSKTTLYLQMNSLRAEDTAVYYCAKSPPGITGTTYYYYYMDVWGKGTTVTVSS

SEQ ID NO: 4023 - protein, 124 aa, synthetic construct
QVQLQESGPGLVKPSETLSLTCTVSGGSISSYYWSWIRQPPGKGLEWIGYIYYSGYTNYNPSLKSRVTISVDTSKNQFSLKLTSVTAADTAVYYCARGEQQVGNYYYYYYMDVWGKGTTVTVSS

SEQ ID NO: 4024 - protein, 122 aa, synthetic construct
QVQLVQSGAEVKKPGASVKVSCKASGYTFTSYGISWVRQAPGQGLEWMGWISGYNGNTNYVQKLQGRVTMTTDTSTNTGHMELRSLRSDDSAVYYCARDPGGYYYSYNMDVWGKGTTVTVSS

SEQ ID NO: 4025 - protein, 118 aa, synthetic construct
QVQLVESGGGLVKPGGSLRLSCAASGFTFSDYYMSWIRQAPGKGLEWVSYISGTGNTIYYADSVKGRFTISRDNAINSLYLQMNSLRAEDTALYYCARERNWGGFDYWGQGTLVTVSS

SEQ ID NO: 4026 - protein, 121 aa, synthetic construct
EVQLVESGGGLVQPGGSLRLSCAASGFTFSSYAMSWVRQAPGKGLEWVSAISGSGGSTYYADSVKGRFTISRDNSKNTLYLQMNSLRAEDTAVYYCAKDRAYYDSSGWDYWGQGTLVTVSS

SEQ ID NO: 4027 - protein, 127 aa, synthetic construct
EVQLVESGGGVVRPGGSLRLSCAASGFTFSSYAMSWVRQAPGKGLEWVSGINWNGGSTGYVDSVKGRFTISRDNAKNSLYLQMNSLRAEDTALYYCARERRFLQWLEGYSYYYMDVWGKGTTVTVSS

SEQ ID NO: 4028 - protein, 123 aa, synthetic construct
EVQLVESGGGLVQPGGSLRLSCAASGFTFSSYSMNWVRQAPGKGLEWVSYISSSSSTIYYADSVKGRFTISRDNAKNSLYLQMNSLRDEDTAVYYCASLAYCGGDCYSDFDYWGQGTLVTVSS

SEQ ID NO: 4029 - protein, 121 aa, synthetic construct
EVKLVESGGGLVQPGRSLRLSCAASGFTFDDYAMYWVRQAPGKGLQWVSGISWSSNNIGYADSVKGRFTISRDNAKNSLYLQMNSLRDEDTAWYYCAKGSTLSTKDWFDPWGQGTLVTVSS

SEQ ID NO: 4030 - protein, 121 aa, synthetic construct
EVQLVESGGGLVQPGRSLRLSCAASGFTFGDYAIHWVRQGPGKGLEWVSGITWNSGSTGYADSVKGRFTISRDNAKNSLYLQMNSLRSEDTALYYCAKGIWFGELFPLDYWGQGTLVTVSS

SEQ ID NO: 4031 - protein, 115 aa, synthetic construct
QVQLVQSGAEVKKPGASVKVSCKASGYTFTSYGISWVRQAPGQGLEWMGWISAYNGNTNYAQKLQDRVTMTTDTSTSTAYMDLRSLRSGDTAVYYCARGRYFDLWGRGTLVTVSS

SEQ ID NO: 4032 - protein, 122 aa, synthetic construct
QVHLQESGPGLVKPSQTLSLTCTVSGGSISSGGYFWTWIRRHPGKGLEWIGYISYSGSTYYTPSLKSRLTLSVDTSKNQFSLKLSSLTAADTAMYYCARTGIPGTTMAFDIWGQGTMVTVSS

SEQ ID NO: 4033 - protein, 116 aa, synthetic construct
EVQLVESGGGLIQPGGSLRLSCAASGFTVISNYMSWVRQAPGKGLEWVSVIYSDGHTDYADSVKGRFTISRDNSKNTLYLQMNSLRAEDTAVYYCARENSNYFDYWGQGTLVTVSS

SEQ ID NO: 4034 - protein, 118 aa, synthetic construct
EVQLVESGGGLVQPGGSLRLSCAASGFTFSDYSMNWVRQAPGNGLEWVSYISSFSSNIYYADSVKGRFTISRDNAKNSLFLQMNGLRDEDTAIYYCARVYRVGAFDYWGQGTLVTVSS

SEQ ID NO: 4035 - protein, 119 aa, synthetic construct
QVQLVQSGAEVKKPGASVKVSCKASGYTFTRYGINWVRQAPGQGLEWMGWISTYNGNTKYEQKIQGRVTMTTDTSTSTAYMDLRSLRSDDTAVYYCARDKPGGAGFDPWGQGTLVTVSS

SEQ ID NO: 4036 - protein, 118 aa, synthetic construct
EVQLVESGGGLVQPGGSLRLSCAASGFTFSNYWMHWVRQAPGKGLVWVSRINSDGSTADSVKGRFTISRDNAKNTLYLQMNSLRAEDSAVYYCAREGTTLVTDAFDIWGQGTMVTVSS

SEQ ID NO: 4037 - protein, 119 aa, synthetic construct
QVQLVQSGSELKKPGASVKVSCKASGYTFTNYALNWVRQAPGQGLEWMGWINTNSGNPRYVQGFTGRFVFSLDTSVSTAYLQISSLKAEDTAVYYCARDSSWFPYFDYWGQGTLVTVSS

SEQ ID NO: 4038 - protein, 119 aa, synthetic construct
QVQLVESGGGVVQPGRSLRLSCAASGFIFSNYGMHWVRQAPGKGLEWVTVILYDGNNKYYADSVKGRFTISRDNSKNTLYLQMNSLRVEDTAVYYCAKPGPRGGQFDYWGQGTLVTVSS

SEQ ID NO: 4039 - protein, 120 aa, synthetic construct
QVQLQESGPGLVKPSGTLSLICGVSGGSISRSNWWSWVRQPPGKGLEWIGEIYHSGSTNYKPSLKSRVTISVDKSKNQFSLKLSSVTAADTAVYWCARGATGDGAGFDYWGQGTLVTVSS

SEQ ID NO: 4040 - protein, 121 aa, synthetic construct
QVHLVQSGAEVKKPGASVKVSCKASGDTFTSHYIHWVRQAPGQGLEWMGIINPRGGGTSSSQKFQGRVTMTRDTSTYTVYMELTSLRSEDTAVYYCARDGFWNGYDWFDPWGQGTLVTVSS

SEQ ID NO: 4041 - protein, 122 aa, synthetic construct
QVQLVQSGAEVKKPGASVKVSCKASGYTFTSYGISWVRQAPGQGLEWMGWISGYNGNTNYVQKLQGRVTMTTDTSTNTAHMELRSLRSDDSAVYFCARDPGGYYYSYNMDVWGKGTTVTVSS

SEQ ID NO: 4042 - protein, 118 aa, synthetic construct; identical to SEQ ID NO: 4036

SEQ ID NO: 4043 - protein, 122 aa, synthetic construct
EVQLVESGGGLVQPGGSLRLSCAASGFTFSSYDMHWVRQATGKGLEWVSAIGTAGDTYYPGSVKGRFTISRENAKNSLYLQMNSLRAGDTAVYYCARGGAARPYYYYYMDVWGKGTTVTVSS

SEQ ID NO: 4044 - protein, 123 aa, synthetic construct
EVQLVESGGGLVQPGGSLRLSCAASGFTFSSYDMHWVRQATGKGLEWVSAIGTAGDTYYPGSVKGRFTISRENAKNSLYLQMNSLRAGDTAVYYCARGGAARPYYYYYYMDVWGKGTTVTVSS

SEQ ID NO: 4045 - protein, 124 aa, synthetic construct
QVQLVQSGSELKKPGASVKVSCKASGYTFTSYAMNWVRQAPGQGLEWMGWINTNTGNPTYAQGFTGRFVFSLDTSVSTAYLQISSLKAEDTAVYYCARERVGATDYYYYYMDVWGKGTTVTVSS

SEQ ID NO: 4046 - protein, 124 aa, synthetic construct
QVQLVQSGSELKKPGASVKVSCKASGYTFTNYAMNWVRQAPGQGLEWMGWINTNTGNPTYAQGFTGRFVFSLDTSVSTAYLQISSLKAEDTAVYYCARDGWELLGYYHYYMDVWGKGTTVTVSS

SEQ ID NO: 4047 - protein, 119 aa, synthetic construct
QVQLQQWGAGLLKPSETLSLTCAVYGGSFSGYYWSWIRQPPGKGLEWIGEINHSGSTNYNPSLKSRVTISVDTSKNQFSLKLSSVTAADTAVYYCASRIAAAALLFDYWGQGTLVTVSS

SEQ ID NO: 4048 - protein, 125 aa, synthetic construct
QVQLQQSGPGLVKPSQTLSLTCAISGDSVSSNSAAWNWIRQSPSRGLEWLGRTYYRSKWYNDYAVSVKSRITINPDTSKNQFSLQLNSVTPEDTAVYYCARACSSTSCYGAFDIWGQGTMVTVSS

SEQ ID NO: 4049 - protein, 122 aa, synthetic construct
QLQLQESGPGLVKPSATLSLTCTVSGGSISSSNYYWGWIRQPPGKGLEWIGSIYYSGSTYYNPSLKSRVTISVDTSKNQFSLKLSSVTAADTAVYYCARQMYNWNDGGFDPWGQGTLVTVSS

SEQ ID NO: 4050 - protein, 128 aa, synthetic construct
EVQLVESGGGLVKPGGSLRLSCAASGFTFSSYSMNWVRQAPGKGLEWVSSISSNSSYIFYADSVKGRFTISRDNAKNSLYLQMNSLRAEDTAVYYCARDGFRYYYDSGGYYSNWFDPWGQGTLVTVSS

SEQ ID NO: 4051 - protein, 106 aa, synthetic construct; identical to SEQ ID NO: 494

SEQ ID NO: 4052 - protein, 111 aa, synthetic construct
QSVLTQPPSVSGAPGQRVTISCTGSNSNIGADYDVHWYQQLPGTAPKLLIYNNNNRPSGVPDRFSGSRSGTSASLAITGLQAEDEAEFYCQSYDTSLNRYVFGTGTKVTVL

SEQ ID NO: 4053 - protein, 110 aa, synthetic construct; identical to SEQ ID NO: 441

SEQ ID NO: 4054 - protein, 108 aa, synthetic construct; identical to SEQ ID NO: 653

SEQ ID NO: 4055 - protein, 108 aa, synthetic construct
SYELTQPPSVSVSPGQTARITCSGDALPKKYAYWYQQKSGQAPVLVIYEDSKRPSGIPERFSGSKSGTMATLTISGAQVEDEADYYCYSTFSSDNYRVFGGGTKLTVL

SEQ ID NO: 4056 - protein, 109 aa, synthetic construct
SYELTQPPSVSVSPGQTARITCSADALPKQYAYWYQQKPGQAPVLVIYKDSERPSGIPERFSGSSSGTTVTLTISGVQAEDEADYYCQSADSSGTYPVVFGGGTKLTVL

SEQ ID NO: 4057 - protein, 108 aa, synthetic construct; identical to SEQ ID NO: 415

SEQ ID NO: 4058 - protein, 106 aa, synthetic construct
DIQMTQSPSTLSASVGDRVTITCRASQSISSWLAWYQQKPGKAPKLLIYKASSLESGVPSRFSGSGSGTEFTLTISSLQPDDFATYYCQQYNSYYTFGQGTKLEIK

SEQ ID NO: 4059 - protein, 113 aa, synthetic construct
DVVMTQSPLSLPVTLGQPASISCRSSQSLVYSDGNTYLNWFQQRPGQSPRRLIYKVSNRDSGVPDRFSGSGSGTDFTLKISRVEAEDVGVYYCMQGTHWPPFTFGPGTKVDIK

SEQ ID NO: 4060 - protein, 107 aa, synthetic construct; identical to SEQ ID NO: 3810

SEQ ID NO: 4061 - protein, 107 aa, synthetic construct
DIQMTQSPSSLSASVGDRVTITCQASQDISNYLNWYQQKPGKAPKLLIYDASNLETGVPSRFSGSGSGTDFTFTISSLQPEDIATYYCQQYDNLPITFGQGTRLEIK

SEQ ID NO: 4062 - protein, 110 aa, synthetic construct
QSALTQPASVSGSPGQSITISCTGTSSDVGGYNYVSWYQQHPGKAPKLMIYDVSKRPSGVSNRFSGSKSGSTASLTISGLQAEDATDYYCCSYAGSSTWVFGGGTRLTVL

SEQ ID NO: 4063 - protein, 112 aa, synthetic construct
DIVMTQTPLSSPVTLGQPASISCRSSQSLVHSDGNTYLSWLQQRPGQPPRLLIYKISNRFSGVPDRFSGSGAGTDFTLKISRVEAEDVGVYYCMQATQFPYTFGQGTKLEIK

SEQ ID NO: 4064 - protein, 108 aa, synthetic construct
EIVLTQSPGTLSLSPGERASLSCRASQSFISSYLAWYLQKPGQAPRLLIYGASSRATGIPDRFSGSGSGTDFTLTISRLEPEDFAMYYCQQSSRSPYTFGQGTYLEIK

SEQ ID NO: 4065 - protein, 113 aa, synthetic construct; identical to SEQ ID NO: 3966

SEQ ID NO: 4066 - protein, 107 aa, synthetic construct
SYVLTQPPSVSVAPGKTARITCGGNNIGSKSVHWYQQKPGQAPVLVIYYDSDRPSGIPERFSGSNSGNTATLTISRVEAGDEADYYCQVWDSSSDVVFGGGTKLTVL

SEQ ID NO: 4067 - protein, 108 aa, synthetic construct; identical to SEQ ID NO: 344

SEQ ID NO: 4068 - protein, 106 aa, synthetic construct
SYELTQPLSVSVALGQTARITCGGNNIGSKNVHWYQQKPGQAPVLVIYRIRNRPSGIPERFSGSNSGNTATLTISRVQVGDEADYYCQVWDSSTWVFGGGTKLTVL

SEQ ID NO: 4069 - protein, 107 aa, synthetic construct
DIQMTQSPSSLSASVGDRVTITCRASQGISNYLAWFQQKPGKTPKSLIFAASSLQSGVPSKFSGSGSGTDFTLTISSLQPEDFATYYCHQYNSYPFTFGPGTKVDIK

SEQ ID NO: 4070 - protein, 107 aa, synthetic construct
EIVLTQSPATLSLSPGERAALSCRASQSVSYYLAWYQQKPGQAPRVLIYDTSNRATGIPARFSGSGSGTDFTLTISSLEPEDFAVYYCQQRSNWPWTFGQGTKVEIK

SEQ ID NO: 4071 - protein, 112 aa, synthetic construct
DIVMTQTPLSSPVTLGQPASISCRSSQSLVYSDGNTYLSWLQQRPGQPPRLLIYKISNRFSGVPDRFSGSGAGTDFTLKISRVEAEDVGVYYCMQATQFPYTFGQGTKLEIK

SEQ ID NO: 4072 - protein, 108 aa, synthetic construct
EIVLTQSPGTLSLSPGERATLSCRASQNISFSYLAWYQQKPGQAPRLLIYGESSRATGIPDRFSGSGSGTDFTLTISRLEPEDFAVYCCQQYVTHLRTFGGGTKVEIK

SEQ ID NO: 4073 - protein, 107 aa, synthetic construct
SYELTQPPSVSVSPGQTASITCSGDKLGDKYACWYQQKPGQSPVLVIYQDSKRPSGIPERFSGSNSGNTATLTISGTQAMDEADYYCQAWDSSTAVVFGGGTKLTVL

SEQ ID NO: 4074 - protein, 110 aa, synthetic construct; identical to SEQ ID NO: 341

SEQ ID NO: 4075 - protein, 109 aa, synthetic construct
QTVVTQEPSLTVSPGGTVTLTCASSTGAVTSGYYPNWFQQKPGQAPRALIYSTSNKHSWTPARFSGSLLGGKAALTLSGVQPEDEAEYYCLLYYGGAYVFGTGTKVTVL

SEQ ID NO: 4076 - protein, 107 aa, synthetic construct
SSELTQDPAVSVALGQTVRITCQGDSLRNYYASWYQQKPGQAPVLVIYAKNNRPSGIPDRFSGSSSGNTASLTITGAQAEDEADFYCNSRDSSGNRMFGGGTKLTVL

SEQ ID NO: 4077 - protein, 106 aa, synthetic construct; identical to SEQ ID NO: 371

SEQ ID NO: 4078 - protein, 106 aa, synthetic construct; identical to SEQ ID NO: 3986

SEQ ID NO: 4079 - protein, 108 aa, synthetic construct; identical to SEQ ID NO: 374

SEQ ID NO: 4080 - protein, 106 aa, synthetic construct; identical to SEQ ID NO: 494

SEQ ID NO: 4081 - protein, 110 aa, synthetic construct
QSALTQPASVSGSPGQSIAFSCTGTSSDVGSYDYVSWYQQHPGKAPKLMIYDVSKRPSGLSNRFSGSKSGNTASLTISGLQAEDEADYYCCSYTSSSTWVFGGGTKLTVL

SEQ ID NO: 4082 - protein, 108 aa, synthetic construct; identical to SEQ ID NO: 369

SEQ ID NO: 4083 - protein, 108 aa, synthetic construct; identical to SEQ ID NO: 386

SEQ ID NO: 4084 - protein, 108 aa, synthetic construct
SYELTQPHSVSVATAQMARITCGGNNIGSKAVHWYQQKPGQDPVLVIYSDSNRPSGIPERFSGSNPGNTATLTISRIEAGDEADYYCQVWDSSSDHRVFGGGTKLTVL

SEQ ID NO: 4085 - protein, 108 aa, synthetic construct; identical to SEQ ID NO: 344

SEQ ID NO: 4086 - protein, 108 aa, synthetic construct
SYELTQPPSVSVSPGQTARITCSADALPKQYAYWYQQKPGQAPVLVIYKDSERPSGIPERFSGSSSGTTVTLTISGVQAEDEADYYCQSADSSGTYWVFGGGTKLTVL

SEQ ID NO: 4087 - protein, 108 aa, synthetic construct; identical to SEQ ID NO: 369

SEQ ID NO: 4088 - protein, 118 aa, synthetic construct
EVQLVQSGAEVKKPGASVKVSCKASGYTFTGNYIHWVRQVPGHGLEWMGWINPYSDATHYAQKFQGRVTLTRDTSINTAYMQLSRLTSDDTAVYYCARAARPDWFDPWGQGTLVTVSS

SEQ ID NO: 4089 - protein, 118 aa, synthetic construct
QVQLVQSGAEVRKPGASVKVSCKASGYTFTDNYIHWVRQVPGQGLEWMGWINPYSGATHYAQNFQDRITMTRDTSINTAYMHLSRLTSDDTTVYYCARAARPDWFDPWGQGTLVTVSS

SEQ ID NO: 4090 - protein, 119 aa, synthetic construct
QVQLVQSGAEVKKPGASVKVSCKASGYTFTNYYMHWVRQAPGQGLEWLGWIIPNSGGTKFAQKFQGRVTMTRDTSINTAYMELSRLRSDDTALYYCARAAYSSSWYDYWGQGTLVTVSS

SEQ ID NO: 4091 - protein, 118 aa, synthetic construct
QVQLVQSGAEVKKPGASVKVSCKASGYTFTNHFMHWVRQAPGQGLEWMGIINPSGGSTNYAQKFQGRVTMTRDTSTSAVYMELSSLRSEDTAVYYCAAADGYEAFDIWGQGTMVTVSS

SEQ ID NO: 4092 - protein, 119 aa, synthetic construct
QVQLVQSGAEVKKPGASMKVSCKVSGYTFTGYYIHWVRQAPGQGLEWMGWIIPNSGGTKYAQKFQGRVTLTRDTSISTAYMDLSRLRSDDTAIYFCARAGFSSSWYDYWGQGTLVTVSS

SEQ ID NO: 4093 - protein, 125 aa, synthetic construct
QMQLVQSGAEVKKPGASVKVSCKASGYTFTGYYMHWVRQAPGQGLEWMGWINPHSGGTNYAQKFQGRVTMTRDTSINTAYMELSRLRSDDTAVYYCARAGICSGTTCYGYGSDYWGQGTTVTVSS

SEQ ID NO: 4094 - protein, 125 aa, synthetic construct
EVQLVQSGAEVKKPGASVKVSCKASGYTFTGYYMHWVRQAPGQGLEWMGWINPHSGGTNYAQKFQGRVTMTRDTSINTAYMELSRLRSDDTAVYYCARAGICSGTTCYGYGSDYWGQGTLVTVSS

SEQ ID NO: 4095 - protein, 119 aa, synthetic construct
QVQLVQSGAEVKKPGASVKVSCKASGYTFTGYYIHWVRQAPGQGLEWMGWIIPNSGGTKYAQNFQGRVTMTRDTSISTAYMELSRLRSDDTAVYFCARAGYSSAWYDYWGQGTLVTVSS

SEQ ID NO: 4096 - protein, 119 aa, synthetic construct
EVQLVQSGAEVRRPGASVRVSCKASGYTFTDYYMHWVRQAPGQGLEWVGWIIPNSGGTKYAQNFQGRVTLTRDTSIRTAHMDLTRLRSDDTAVYFCARAGYSSSWYDNWGQGTTVTVSS

SEQ ID NO: 4097 - protein, 119 aa, synthetic construct
EVQLVESGAEVKKPGASVKVSCKASGYTFTNYYIHWVRQAPGQGLEWMGWIIPNSGGTKYAQKFQGRVTMTRDTSISTAYMDLSRLRSDDTAIYYCARAGYSSSWYEYWGQGTLVTVSS

SEQ ID NO: 4098 - protein, 118 aa, synthetic construct
EVQLVESGGGVVQPGRSLRLSCAASGFTFSGYDMHWVRQAPGKGLEWLAVIWYDGSNKYYADSVKGRFTISRDNSKNTLYLQMNSLRAEDTAVYYCARAIAAAGFDYWGQGTTVTVSS

SEQ ID NO: 4099 - protein, 119 aa, synthetic construct
QVQLVESGAEVKKPGASVKVSCKASGYTFTGNYIHWLRQAPGQGLEWMGWIHPYSGGTKYAQKFQGRVTMTRDTSISTAYMDLNRLRSDDTAVYYCARAPAGTPYFDYWGQGTTVTVSS

SEQ ID NO: 4100 - protein, 119 aa, synthetic construct
EVQLVQSGAEVKKPGASVKVSCKASGYTFTGYYMHWVRQAPGQGLEWLGWIIPNSGGTKYAQKFQGRVTMARDTSLSTAYMELTSLGSDDTAFYYCARASYSSSWYDYWGQGTLVTVSS

SEQ ID NO: 4101 - protein, 119 aa, synthetic construct
EVQLVQSGAEVKKPGASVKVSCKASGYTFTGYYIHWVRQAPGQGLEWMGWIIPNSGGTKYAQKFQGRVTMTRDTSTSTVYMEMSRLRSDDTAVYYCARAYINSAYFDYWGQGTLVTVSS

SEQ ID NO: 4102 - protein, 118 aa, synthetic construct
EVQLVESGGGVVRPGGSLRLSCAASGFTFGDYGMSWVRQAPGKGPEWVSGINWNGDSKGYVDSVKGRFSISRDNAKNSLYLEMNSLRAEDTALYYCARDDFYYYMDAWGRGTTVTVSS

SEQ ID NO: 4103 - protein, 119 aa, synthetic construct
EVQLVESGGGLVKPGGSLRLSCAASGFTFSSYSMNWVRQAPGKGLEWVSVISGSGGGTFYADSVKGRFTVSRDNSKNTLYLQINSLRAEDTAVYYCARDDWNYEAFDIWGQGTMVTVSS

SEQ ID NO: 4104 - protein, 121 aa, synthetic construct
QVQLVQSGAEVKKPGASVRVSCKASGYTFTNYGISWVRQAPGQGLEWMGWISAYNGNTNYAQKLQGRVTMTTDTSTSTAFMELRSLRSDDTAVYYCARDDYYYDGSGFDFWGQGTTVTVSS

SEQ ID NO: 4105 - protein, 118 aa, synthetic construct
QVTLKESGGGVVRPGGSLRLSCAASGFTFGDYGMSWVRQVPGKGLEWVSGINWNGDSTGYVDSVKGRFTISRDNAKNSLYLQMNSLRAEDTALYYCARDDYYYYMDVWGKGTTVTVSS

SEQ ID NO: 4106 - protein, 119 aa, synthetic construct
QVQLVQSGAEAKKPGTSVTVSCKASGYTFTSYYMHWVRQAPGQGLEWVGVISPTGGGTHYAQKFQGRVTMTRDTSTSTVSMELTSLRSEDTAVYYCARDEAGDDAFDIWGQGTMVTVSS

SEQ ID NO: 4107 - protein, 119 aa, synthetic construct
EVQLVQSGAEAKKPGTSVTVSCKASGYTFTSYYMHWVRQAPGQGLEWVGVISPTGGGTHYAQKFQGRVTMTRDTSTSTVSMELTSLRSEDTAVYYCARDEAGDDAFDIWGQGTMVTVSS

SEQ ID NO: 4108 - protein, 119 aa, synthetic construct
QVQLVQSGAEAKKPGTSVTVSCKASGYTFTSYYMHWVRQAPGQGLEWVGVISPTGGGTHYAQKFQGRVTMTRDTSTSTVSMELSSLRSEDTAVYYCARDEAGDGAFDIWGQGTMVTVSS

SEQ ID NO: 4109 - protein, 118 aa, synthetic construct
EVQLVESGPGLVKPSETLSLTCTVSGGSIRSTNYYWGWIRQPPGKGLEWIGSIYYSGITYYNPSLKSRVTISVDTSKNQFSLKLSSVTAADTAVYYCARDGWDAFDIWGQGTMVTVSS

SEQ ID NO: 4110 - protein, 121 aa, synthetic construct
QVQLQQSGPGLVKPSQTLSLTCAISGDSVSSNSATWNWIRQSPSRGLEWLGRTYYRSKWYNDYAVSVKSRITINADTYKNQFSLHLNSVTPEDTAVYYCARDGWNDDFDYWGQGTTVTVSS

SEQ ID NO: 4111 - protein, 121 aa, synthetic construct; identical to SEQ ID NO: 3886

SEQ ID NO: 4112 - protein, 116 aa, synthetic construct
QVQLVESGGGLVKPGGSLRLSCAASGFTFSNAWMSWVRQAPGKGLEWVGRIKSKTDGGTTDYAAPVKGRFTISRDDSKNTLYLQMNSLKTEDTAVYYCTTDHPYYWGQGTLVTVSS

SEQ ID NO: 4113 - protein, 121 aa, synthetic construct
QVQLQQSGPGLVKPSQTLSLTCDISGDSVSSNIAAWNWIRQSPSRGLEWLGRTYYRSKWYNEYAVSVKGRMTITPDTSKNHFSLQLNSVTPEDTAVYYCARDLHSSTLDYWGQGTLVTVSS

SEQ ID NO: 4114 - protein, 121 aa, synthetic construct
QVQLQQSGPGLVKPSQTLSLTCDISGDSVSSNSTAWNWIRQSPSRGLEWLGRTYYWSKWYNEYAVSVKGRIIITPDTSKNHFSLQLNSVTSEDTAVYYCARDLHSSTLDYWGQGTTVTVSS

SEQ ID NO: 4115 - protein, 122 aa, synthetic construct
QVQLVESGGGLVQPGGSLRLSCAASGFTFTSYAMTWVRQVPGKGLEWVSAISGSGGQTFSADSVKGRFTISRDNSKNTLYLQMNSLRAEDTAVYYCAKDLKWEILPDAFDIWGQGTMVTVSS

SEQ ID NO: 4116 - protein, 122 aa, synthetic construct
EVQLVQSGGDLVQPGGSLRLSCATSGFTFSNYAMTWVRQAPGKGLEWVSAITGSGGNTFSADSVKGRFTISRDNSKNTLYLQMNSLRAEDTAVYYCAKDLKWELLPDAFDIWGHGTMVTVSS

SEQ ID NO: 4117 - protein, 122 aa, synthetic construct
EVQLVESGGGLVQPGGSLRLSCAASGFTFSGYDVNWVRQAPGKGLEWISGISSSGESTYYADSVKGRFTISRDNSKRTLYLDMSSLRAEDTAFYYCARDMGFNWNYGAFNMWGQGTMVTVSS

SEQ ID NO: 4118 - protein, 117 aa, synthetic construct
QVQLVQSGAEVKKPGASVKVSCKASGYTFSGYYMHWVRQAPGQGLEWMGWINPNSGGTNYAQKFQGRVTMTRDTSINTAYMELSRLRSDDTAVYYCARDNWNSFDFWGQGTLVTVSS

SEQ ID NO: 4119 - protein, 118 aa, synthetic construct
EVQLVESGGGLVQPGGSLRLSCAASGFTFSDYYMSWIRQAPGKGLEWVSYISGPGSTIYYADSVKGRFTTSRDNAKNSLYLQMNSLKAEDTAVYYCARDNWNYGFDYWGQGTLVTVSS

SEQ ID NO: 4120 - protein, 120 aa, synthetic construct
QVQLQESGPGLVKPSGTLSLTCAVSGGSIISNNWWSWVRQSPGKGLEWIGEIYHNGTTSYNPSLESRVTISIDKSKNQLSLRLRSVTAADTAVYYCARDQEGLTGCHDYWGQGTLVTVSS

SEQ ID NO: 4121 - protein, 123 aa, synthetic construct
QVQLVQSGSELKKPGASVKVSCKASGYTFTSYAMNWVRQAPGQGLEWMGWINTNTGNPTYAQGFTGRFVFSLDTSVSTAYLQISSLKAEDTAVYYCARDRNYYGSGSYYGDYWGQGTTVTVSS

SEQ ID NO: 4122 - protein, 121 aa, synthetic construct
QVQLVQSGAEVKKPGSSVKVSCKASGGTLSRYAVNWVRQAPGQGLEWMGGIIPIFGTVNYAQKFQGRVTITADESTSTAYMELSSLRSEDTALYYCASDRSGTTNWFFDLWDRGTLVTVSS

SEQ ID NO: 4123 - protein, 122 aa, synthetic construct
EVQLVESGGGLIQPGGSLRLSCAASGFTFSNYAMNWVRQAPGKGLEWVSAILGSGGNTYYADSVKGRFTISRDNSKNTLYLQMNSLRAEDTAVYYCAKDRSNWNFGDWFDPWGQGTLVTVSS

SEQ ID NO: 4124 - protein, 123 aa, synthetic construct
QVQLVQSGSELKKPGASVRVSCKASGYTFTNYAMNWVRQAPGQGLEWMGWINTNTGNPTYAQGFTGRFVFSLDTSVSTAYLQISSLKAEDTAVYYCARDRYYYGSGTYFFDFWGQGTTVTVSS

SEQ ID NO: 4125 - protein, 117 aa, synthetic construct
QVQLVQSGAEVKKPGASVKVSCKASGYTFTNYGISWVRQAPGQGLEWMGWISAYNGNTNYAQKLQGRVTMTTDTSTSTAYMELRGLRSDDTAVYYCARDSRGWFDPWGQGTLVTVSS

SEQ ID NO: 4126 - protein, 121 aa, synthetic construct
EVQLVQSGGGLVQPGGSLRLSCAASGFTFSSYSMNWVRQAPGKGLEWVSYISSSSSTIYYADSVKGRFTISRDNAKNSLYLQMNSLRDEDTAVYYCARDVGGNYYYNMDVWGKGTTVTVSS

SEQ ID NO: 4127 - protein, 119 aa, synthetic construct
EVQLVQSGAEVMKPGASVKVSCKASGYTFTGYYMNWVRQAPGQGLEWMGLISPNSGDTYYSHKFQGRVTMTRDTSISTAYMELSRLRSDDTAVYYCARDYGDYDGMDVWGKGTTVTVSS

SEQ ID NO: 4128 - protein, 126 aa, synthetic construct
QVQLVQSGAEVKKPGASVKVSCKASGYTFTGYYMHWVRQAPGQGLEWMGWINPNSGDTNYEQKFQGRVTMTRDTSISTAYMELSSLRSDDTAVYYCAREDIAAVGENYYYYYMDVWGKGTTVTVSS

SEQ ID NO: 4129 - protein, 126 aa, synthetic construct
QVQLVQSGAEVKKPGASVKVSCKASGYTFTGYYMHWVRQAPGQGLEWMGWINPNSGDTNYEQKFQGRVTMTRDTSISTAYMELSRLRSDDTAVYYCAREDIAAVGENYYYYYMDVWGKGTTVTVSS

SEQ ID NO: 4130 - protein, 121 aa, synthetic construct
EVQLVQSGAEVKKPGASVKVSCKPSGYTFSGYYLHWVRQAPGQGLEWVGWIDPNSGGTNSAQIFQGRVTMTRDTSISTAYMELSGLRSDDTAVYYCAREDTWNFVPYFDYWGQGTLVTVSS

SEQ ID NO: 4131 - protein, 125 aa, synthetic construct
QMQLVQSGAEVKKPGASVKVSCKASGYTFTGSYIHWVRQAPGQGLEWMGWINPNSGATNYAQRFQGRVTMTRDSSISTAYMELSSLRSADTAVYYCAKEGIAPVDTGYYYYMDVWGKGTTVTVSS

SEQ ID NO: 4132 - protein, 124 aa, synthetic construct
QVQLQESGPGLVKPSGTLSLTCAVSGGSISSTNWWSWVRQPPGKGLEWIGAIYQTGNTYYNPSLKSRVTMSVDKSTNQFSLKLNSVTAADTAVYYCAREGLYFGDLLSYAFDIWGQGTMVTVSS

SEQ ID NO: 4133 - protein, 125 aa, synthetic construct
QVQLVESGAEVKKPGASVKVSCKASGYTFTGNYIHWVRQAPGQGLEWMGWINPNSGHTNYAQNFQGRVTMTRDTSISTAYMELNRLRSDDTAVYYCAKEGVAAAGTGFFYYMDVWGKGTLVTVSS

SEQ ID NO: 4134 - protein, 123 aa, synthetic construct
EVQLVQSGGGLVQPGGSLRLSCEVSGFTFSWYWMHWVRQVPGEGLVWVSRIKSDGSNTRYADSVKGRFTISRDNAKNTLYLQMSSLRAEDTAVYYCAREGWGINGLGGAFDIWGQGTMVTVSS

SEQ ID NO: 4135 - protein, 123 aa, synthetic construct
QVQLVESGGGLVQPGGSLRLSCAASGFSFSWHWMHWVRQAPGKGLEWVSRIKSDGSNTKYADSVKGRFTISRDNAKNTMYLQMNSLRDEDTAVYYCAREGWGISGLGGAFDIWGQGTMVTVSS

SEQ ID NO: 4136 - protein, 123 aa, synthetic construct
QVQLVESGGGLVQPGRSLRLSCAASGFTFSWFWLHWVRQAPGKGLVWVSRIKSDGSSTKYADSVKGRFTISRDNAKNTLYLQMNSLRDEDTAVYYCAREGWGITGQGGALDIWGQGTMVTVSS

SEQ ID NO: 4137 - protein, 123 aa, synthetic construct
EVQLVESGGGLVQPGGSLRLSCEASEFTFSYYWLHWVRQAPGKGLVWVSRINSDGSNTKYADSVKGRFTISRDNAKNTLYLQMNSLRAEDTAVYYCAREGWGMTGLGGAFDIWGQGTMVTVSS

SEQ ID NO: 4138 - protein, 123 aa, synthetic construct
EVQLVQSGGGLVQPGGSLRLSCAASGFTFSWYWMHWVRQVPGKGLVWVSRIKSDGGSPKYADSVKGRFTISRDNARNTLYLQMNSLGAEDTAVYYCTREGWGMTGLGGAFDIWGQGTMVTVSS

SEQ ID NO: 4139 - protein, 126 aa, synthetic construct
QLQLQESGGGLVKPGGSLRLSCAASGFTFTNYTMNWVRQAPGKGLEWVSSISSSGTYIYYADSVKGRFTISRDNAKNSLHLQMNSLRAEDSAVYYCSREGYYDFLTGYISDAFDIWGQGTMVTVSS

SEQ ID NO: 4140 - protein, 126 aa, synthetic construct
QVQLVQSGGGLVKPGGSLRLSCAASGFTFSRYRMNWVRQAPGKGLEWVSSISSSTSYIFYADSVKGRFTISRDNAKNSLYLHMNSLRAEDTAVYYCAREGYYNNSGYYFPDAFDIWGQGTMVTVSS

SEQ ID NO: 4141 - protein, 125 aa, synthetic construct
QVQLVQSGAEVKKPGASVKVSCKASGYTFTDYYVYWVRQAPGQGLEWLGWINPDSGGTNYEQKFQGRVTMTRDTSISTAYMELSRLRSDDTAVYYCTREKGLRYSGYDRGYFDYWGQGTLVTVSS

SEQ ID NO: 4142 - protein, 125 aa, synthetic construct
EVQLVESGAEVRKPGASVKVSCKASGYTFTDYYIHWVRQAPGQGLEWMGWINPNSGGTHYAQKFQGRVTLTRDTSISTAYMELSRLTSDDTAVYYCAKEMGLRYSGYDRGYFDYWGQGTLVTVSS

SEQ ID NO: 4143 - protein, 125 aa, synthetic construct
EVQLVESGPGLVKPSGTLSLTCAVSGGSISSNNWWSWVRQPPGKGLEWIGEIYHSGSTSYNPSLKSRVTMSVDQSKNQFSLQLTSVTAADTAMYYCARERGYDSEYYFYYYMDVWGKGTTVTVSS

SEQ ID NO: 4144 - protein, 126 aa, synthetic construct
QVQLQESGPGLVKPSGTLSLTCAVSGGSINSSNWWSWVRQSPGKGLEWIGEIYHSGSTSYNPSLKSRVTISVDKSKNQFSLKLSSVTVADTAVYYCARERGYSSPHYYFYYYMDVWGKGTTVTVSS

SEQ ID NO: 4145 - protein, 119 aa, synthetic construct
QVQLVESGGGLVKPGGSLRLSCAASGFTFSYSTMTWVRQAPGKGLEWVSSIGGIGGYTYYADSVKGRFTISRDNSTNTMYLQMNSLRDEDTAVYYCAKERVAANYFDYWGQGTTVTVSS

SEQ ID NO: 4146 - protein, 125 aa, synthetic construct
QVQLVESGPGLVKPSGTLSLTCAVSGGSISSSNWWSWVRQTPGKGLEWIGEIYHSGSTSYNPSLKSRVTMSVDKSNNQFSLKLNSVTAADTAVYYCARESGYDDDYYFYYYMDVWGKGTTVTVSS

SEQ ID NO: 4147 - protein, 121 aa, synthetic construct
EVQLVQSGAEVKKPGASVRVSCKASGYTFTNYGISWVRQAPGQGLEWMGWISAYNGNTKYAQKLQGRVTMTTDTSTSTAFMELRSLRSDDTAVYYCVRESSSWYGPLFAIWGQGTMVTVSS

SEQ ID NO: 4148 - protein, 124 aa, synthetic construct
QVQLQESGPGLVKPSGTLSLTCAVSGGSISSSDLWSWVRQPPGKGLEWIGEIYHSGTTNSNPSLKSRVTISVDKSKNQFSLKLSSVTAADTAVYYCAREVYSSSSGGYWYFDLWGRGTLVTVSS

SEQ ID NO: 4149 - protein, 122 aa, synthetic construct
QVQLQESGPGLVKPSGTLSLTCAVSGGSISSNNWWSWVRQSPGKGLEWIGEIYHTGSTNYNPSLKSRVSISVDKSKNQLSLKLTSVTAADTAVYYCAGFVVAPDPIGYFDPWGQGTLVTVSS

SEQ ID NO: 4150 - protein, 122 aa, synthetic construct
QLQLQESGPGLVKPSGTLSLTCAVSGGSISSSNWWSWVRQSPGKGLEWIGEIYHSGSTNYNPSLKSRVTISVDKSKNQFSLKLSSVTAADTAVYYCAGFVVAPVPIGYFDPWGQGTLVTVSS

SEQ ID NO: 4151 - protein, 122 aa, synthetic construct
QVQLQESGPGLVKPSGTLSLTCAVSGGSISSSDWWSWVRQSPGKGLEWIGEVYHSGSTNYNPSLRSRVTISVDKSKNQFSLKLTSVTAADTAVYYCARFVVEPDLIGWFDPWGQGTTVTVSS

SEQ ID NO: 4152 - protein, 120 aa, synthetic construct
QVQLQESGPGLVKPSGTLSLTCAVSGGSISSSNWWSWVRQPPGKGLEWIGEIYHSGSTNYNPSLKSRVTISVDKSENQFSLKLSSVTAADTAVYYCARGAAVDGAGFDYWGQGTLVTVSS

SEQ ID NO: 4153 - protein, 120 aa, synthetic construct
QVQLQESGPGLVKPSGTLSLTCAVSGGSISSSNWWTWVRQPPGKGLEWIGEIYHSGSSNYNPSLKSRVTMSVDKSKNQFSLKLSSVTAADTAVYYCARGATGDGAGFDYWGQGTLVTVSS

SEQ ID NO: 4154 - protein, 120 aa, synthetic construct
QLQLQESDPGLVKPSGTLSLTCAVSGGSISSSNWWSWVRQPPGKGLEWIGEIYHSGSTNYNPSLKSRVTISVDKSENQFSLKLSSVTAADTAVYYCARGATVDGAGFDYWGQGTLVTVSS

SEQ ID NO: 4155 - protein, 124 aa, synthetic construct
QVQLQQSGPGLVKPSQTLSLTCAISGDSVSSNSAAWNWIRQSPSRGLEWLGRTYFRSEWYTDYAVSVKSRITINPDTSKNQFSLQMNSVTPEDTSMYYCARGDIAAAGYYFDYWGQGTLVTVSS

SEQ ID NO: 4156 - protein, 124 aa, synthetic construct
QVQLQQSGPGLVKPSQTLSLTCAISGDSVSTNSAAWNWIRQSPSRGLEWLGRTYYRSRWYNDYAVSVKSRLTINPDTSKNQIYLQLNSVTPEDTAVYYCARGDIGAAGYYFDYWGQGTLVTVSS

SEQ ID NO: 4157 - protein, 124 aa, synthetic construct
QVQLQQSGPGLVKPSQTLSLTCAISGDSVSSNSAAWNWIRQSPSGALEWLGRTYYRSKWYNDYGVSVTGRIIINLDTSKNQFSLQLNSVTPEDTAVYYCARGDIGTAGFYFDYWGQGTLVTVSS

SEQ ID NO: 4158 - protein, 124 aa, synthetic construct
QVQLQQSGPGLVKPSQTLSLTCAVSGDSVSTNGASWNWVRQSPSRGLEWLGRTYYRSDWYNDYTGSVIGRITINPDTSRNQFSLHLNSVTPEDTAVYYCARGDIGTAGYYFDSWGQGTLVTVSS

SEQ ID NO: 4159 - protein, 124 aa, synthetic construct
QVQLQQSGPGLVKPSQTLSLTCAISGDSVSTNSASWNWIRQSPSRGLEWLGRTYYRSNWYTDYAVSVISRMTINLDTSKNQFSLQLNTVTPEDTAVYYCTRGDVGSAGYFFDYWGQGTLVTVSS

SEQ ID NO: 4160 - protein, 123 aa, synthetic construct
QVQLVESGGGLVKPGGSLRLSCSASGFTFSTSLMNWVRQAPGKGLEWVSSITSGGTYISYTDSVKGRFTISRDNAKNSLFLHMDSLRAEDTAVYYCARGDWNYPPYYYYMDVWGKGTTVTVSS

SEQ ID NO: 4161 - protein, 124 aa, synthetic construct
RVQLQQSGLGLVKPSQTLSITCDISGDSVSRNSVAWNWIRQSPSRGLEWLGRTDYRSMWSGDYVESVQGRIIINLDTSKNQFSLHLSSVTPEDTAVYYCARGEAGSAGFYFDYWGQGTLVTVSS

SEQ ID NO: 4162 - protein, 120 aa, synthetic construct
QVQLQQSGPGLVKPSQTLSLTCAISGDSVSRNSSAWNWIRQSPSRGLEWLGRTYYWSKWYYEYAISVKGRMTINPDTSKNQFSLQLHSVTPEDSAVYYCVRGEAGTLDYWGQGTLVTVSS

SEQ ID NO: 4163 - protein, 124 aa, synthetic construct
QVQLQQSGPGRLKPSQTLSLTCAISGDSVSSNSAAWNWIRQSPSRGLEWLGRTYYRSNWFGDNAASVQGRITINPDTSKNQLSLHLHSLTPEDTAIYYCARGETGTAGYYFDSWGQGTLVTVSS

SEQ ID NO: 4164 - protein, 124 aa, synthetic construct
QVQLQQSGPGLVKPSQTLSLTCDISGDSVSSISASWNWIRQSPSRGLEWLGRTYYRSKWYNDYGVSVKSRMTINPDTSKNQFSLQLNSVTPEDTAVYYCARGETGTAGYYFDYWGQGTLVTVSS

SEQ ID NO: 4165 - protein, 124 aa, synthetic construct
QVQLQQSGPGLVKPSQTLSLTCAISGDSVSSNSAAWNWIRQSPSRGLEWLGRTYYRSNWYGDYAVSVQGRITINPDTSKNQFSLQLNSLTPEDTAVYYCARGETGTAGYYFDYWGQGTLVTVSS

SEQ ID NO: 4166 - protein, 124 aa, synthetic construct
QVQLQQSGPGLVKPSQTLSLTCAISGDSVSSKSASWNWIRQSPSRGLEWLGRTYYRSEWYNDYALSVISRIIINPDTSKNQFSLQLNSVTPEDTAVYYCARGETGTAGYYMDVWGKGTTVTVSS

SEQ ID NO: 4167 - protein, 124 aa, synthetic construct
QVQLQQSGPGLVKPSQTLSLTCAISGDSVSNNSAAWNWIRQSPSRGLEWLGRTYYRSEWFNDYGASVIGRIIINPDTSKNQFSLQLNSVTPEDTAIYYCARGEVGASGYYMDVWGKGTTVTVSS

SEQ ID NO: 4168 - protein, 124 aa, synthetic construct
QVQLQQSGPGLVKPSQTLSLTCDISGDSVSSNGATWNWIRQSPSRGLEWLGRTYYRSQWYNDYGVSVLSRITINPDTSKNQFSLQLNSVTPEDTAVYYCARGGIAGAGTLFDYWGQGTLVTVSS

SEQ ID NO: 4169 - protein, 124 aa, synthetic construct
QVQLQQSGPGLVKPSQTLSLTCDISGDSVSSNSATWNWIRQSPSRGLEWLGRTYYRSKWYNDYSVSVTSRMTINPDTSKNQFSLQLNSVTPEDTAVYYCARGGIASAGTFFDYWGQGTTVTVSS

SEQ ID NO: 4170 - protein, 124 aa, synthetic construct
QVQLQQSGPGLVKPSQTLSLTCAISGDSVSNNSASWNWIRQSPSRGLEWLGRTFYRSNWYNDYSVSVISQITINTDTSANQFSLHLNSVTPEDTAVYFCARGGIGAAGYYFDYWGQGTLVTVSS

SEQ ID NO: 4171 - protein, 125 aa, synthetic construct
EVQLVQSGAEVKKPGASVKVSCKASGYTFTGYYMHWVRQAPGQGLEWMGWINPNSGGTNYAQKFQGRVTMTRDTSISTAYMELSRLRSDDTAVYFCARGGVCSGITCYGYGSDYWGQGTLVTVSS

SEQ ID NO: 4172 - protein, 125 aa, synthetic construct
EVQLVQSGAEVKKPGASVRVSCKASGYTFTGNYMHWVRQAPGQGLEWMGWINPNSGGTNYVQKFQGRVTMTRDTSISTAYMELSRLRSDDTAVYFCARGGVCSGTTCYGYGSDYWGQGTTVTVSS

SEQ ID NO: 4173 - protein, 124 aa, synthetic construct
QVQLQQSGPGLVRPSQTLSLTCAISGDSVSHNSASWNWIRQSPSRGLEWLGRTYYRSSWYNDYAVSVISRITINPDTSKNQFSLQLNSVTPEDTAVYYCARGGVGPAGYYFDYWGQGTTVTVSS

SEQ ID NO: 4174 - protein, 123 aa, synthetic construct
EVQLVQSGAEVQKPGASVKVSCKASGITFTGYYMHWVRQAPGQGLEWMGWINPKSDGTNYAQKFQGRVTMTRDTSISTSYMELSRLRSDDTAVYYCVRGGVYGSRWPKAFDIWGQGTMVTVSS

SEQ ID NO: 4175 - protein, 121 aa, synthetic construct
QVQLVQSGGGLVQPGGSLRLSCAASGFTFRTYSMNWVRQAPGKGLEWISYISSSSSTIYYADSVKGRFTISRDNAKNSLYLQMNSLRDEDTAVYYCVRGGYDTSGFAFDIWGQGTMVTVSS

SEQ ID NO: 4176 - protein, 120 aa, synthetic construct
QVQLVQSGAEVKKPGASVKVSCKASGYTFTGYYMHWVRQAPGQGLEWMGWINPTSGATNYAQKFQGRITMTRDTSISTVYMDLIRLRSDDTALYYCARGHLLLPDAFDIWGHGTMVTVSS

SEQ ID NO: 4177 - protein, 120 aa, synthetic construct
EVQLVESGAEVKKPGASVKVSCKASGYTFTGYYMHWVRQAPGQGLEWMGWINPTSGATNYAQKFQGRITMTRDTSISTVYMDLIRLRSDDTALYYCARGHLLLPDAFDIWGHGTMVTVSS

SEQ ID NO: 4178 - protein, 120 aa, synthetic construct
QVQLVQSGSEVKSPGASVKVSCKASGYTLTGNYIHWVRQAPGQGLEWMGWINPNSGVTYSAQKLQGRVTMTRDTSISTAYMELGSLRSDDTAVYYCARGHQLVPDAFDIWGQGTMVTVSS

SEQ ID NO: 4179 - protein, 118 aa, synthetic construct
QVQLVQSGGGVVQPGRSLRLSCAASGFTFSGYDMHWVRQAPGKGLEWVAVIWYDGSNKYYADSVKGRFTISRDNSKNTLYLQMNSLSAEDTAVYYCARGIAGAAFDYWGQGTLVTVSS

SEQ ID NO: 4180 - protein, 132 aa, synthetic construct
QVQLQQSGPGLVKPSQTLSLTCAISGDSVSSNSAAWNWIRQSPSRGLEWLGRTYYRSRWYNDYAVSVKSRITINPDTSKNQFSLQLNSVTPEDTAVYYCARGKEWGHTNTWYGVNYYYMDVWGKGTTVTVSS

SEQ ID NO: 4181 - protein, 125 aa, synthetic construct
QVQLQESGPGLVKPSGTLSLTCAVSGGSISSSNWWNWVRQPPGKGLEWIGEIYHSGSTSYNPSLKSRVTISVDKSKNQFSLKLSSVTAADTAVYYCARGKGYDLEYYYYYYMDVWGKGTTVTVSS

SEQ ID NO: 4182 - protein, 120 aa, synthetic construct
QVQLVQSGAEVMRPGASVKVSCKASGYTFTNYYIHWVRQAPGQGLEWLGWINSNSGVTNYAQKFQDRVTMTRDTSISTAHLELSGLRSDDTAIYYCAKGKWELPDAFDFWGQGTMVTVSS

SEQ ID NO: 4183 - protein, 124 aa, synthetic construct
QVQLQQSGPGLVKPSQTLSLTCAISGDSVSNNGASWNWIRQSPSRGPEWLGRTYYRSGWYNDYAVSVISQITITPDTSKNQFSLQLNSVTPEDTALYFCARGNIGPAGYHFDYWGQGTLVTVSS

SEQ ID NO: 4184 - protein, 124 aa, synthetic construct
QVQLQQSGPGLVRPSQTLSLTCAISGDSVSSNSAAWNWIRQSPSRGLEWLGRTYYRSDWYNDYGISVTSRATIYPDTSKNQFSLQLNSVTPEDTAVYYCARGNVGPAGYHFDYWGQGTLVTVSS

SEQ ID NO: 4185 - protein, 118 aa, synthetic construct
QVQLQQWGAGLLKPSETLSLTCAVYGGSFSGYYWSWIRQSPGKGLEWIGDINHSGSINYNPSLKSRVTMSVDTSKNHFSLKLSSVTAADTAVYYCARGPAGTDAFDIWGQGTMVTVSS

SEQ ID NO: 4186 - protein, 120 aa, synthetic construct
QVQLQESGPGLVRPSGTLSLTCVVSGGSISSSNWWNWVRQPPGKGLEWIGEIYHSGSTNYNPSLKSRVTISVDKSKNQFSLKLSSVTAADTAVYYCARGPSRDGAGFDYWGQGTLVTVSS

SEQ ID NO: 4187 - protein, 120 aa, synthetic construct
QVQLQESGPGLVKPSGTLSLTCAVSGGSISSSNWWNWVRQPPGKGLEWIGEIYHSGSTNYNPSLKSRVTISVDKSKNQFSLKLSSVTAADTAVYYCARGPSVDGAGFDYWGQGTLVTVSS

SEQ ID NO: 4188 - protein, 120 aa, synthetic construct
QVQLQQSGPGLVKPSGTLSLTCAVSGGSISSSNWWNWVRQPPGKGLEWIGEIYHSGSTNYNPSLKSRVTISVDKSKNQFSLKLSSVTAADTAVYYCARGPTGDGAGFDYWGQGTTVTVSS

SEQ ID NO: 4189 - protein, 121 aa, synthetic construct
QVQLVESGGGLVTPGGSLRLSCAASGFTFNTYSMNWVRQAPGKGLEWVSSISSSGFYIYYADSVKGRFTISRDNAKNLLYLQMNSLRAEDTAVYYCGGGPTGNYYYFMDVWGKGTTVTVSS

SEQ ID NO: 4190 - protein, 120 aa, synthetic construct
QVQLVQSGAEVKRPGASVKVSCKASGYTFTGYYMHWVRQAPGQGLEWMGWINPNSGVTNYSQKFQGRVTMTRDTSISTAYMELRSLRSDDTAVYYCARGQQLVPDAFDIWGQGTMVTVSS

SEQ ID NO: 4191 - protein, 119 aa, synthetic construct
EVQLVQSGAEVKKPGASVKVSCKASGYTFTGYYIHWVRQAPGQGLEWMGWINPISGDTHFAQKFQGRVTMTRDTSISTAYMELSRLSSDDTAVYHCARGSTWPDVFGIWGQGTMVTVSS

SEQ ID NO: 4192 - protein, 121 aa, synthetic construct
QVQLQQSGPGLVKPSQTLSLTCAISGDSVSNNSAAWNWIRQSPSRGLEWLGRTYYRSKWYNDYAKSRITINPDTSKNQISLQLNSVTPEDTAVYYCARGTIAAAGYYFDYWGQGTLVTVSS

SEQ ID NO: 4193 - protein, 118 aa, synthetic construct
QVQLVQSGAEVKKPGASVKVSCKASGYTFTNYGISWVRQAPGQGLEWMGWIRTYNGNTNYAQRFQGRVTMTTDTSTNTAYMELRSLRSDDTAVYYCARGTLFNWIDPWGQGTLVTVSS

SEQ ID NO: 4194 - protein, 124 aa, synthetic construct
QVQLQQSGPGLVKPSQTLSLTCAISGDSVSSNSASWNWIRQSPSRGLEWLGRTYYRSNYYNDYAVSVPSRIHINPDTSKNQFSLQLNSVTPEDTAVYYCARGVVGASGYYMDVWGKGTTVTVSS

SEQ ID NO: 4195 - protein, 120 aa, synthetic construct
EVQLVQSGAEVKKPGASVKVSCKASGYTFTGHYIHWVRQAPGQGPEWMGWSNPYSGATHYAEKFQGRVTMTLDTSISTAYMELSRLRSDDTAMYSCARGYNWNPDAFDIWGQGTMVTVSS

SEQ ID NO: 4196 - protein, 120 aa, synthetic construct
QLQLQESGPGLVKPSETLSLTCTVSGGSISSSYYYWGWIRQPPGKGLEWIGSFYYNGFTYYNPSLKSRVTMSVDSSKNQFSLRLTSVTAADTAVYYCARHEMGANAFDIWGQGTMVTVSS

SEQ ID NO: 4197 - protein, 120 aa, synthetic construct
QVQLQESGPGLVKPSETLSLTCTVSGGSISSSYYYWGWIRQPPGKGLEWIGSFYYNGFTYYNPSLKSRVTMSVDSSKNQFSLRLTSVTAADTAVYYCARHEVGANAFDIWGQGTMVTVSS

SEQ ID NO: 4198 - protein, 118 aa, synthetic construct
QVQLQESDPGLVKPSETLSLTCTVSGGSIRSSNYYWGWIRQPPGKGLEWIGNIYFRGNTYYNPSLKSRVTISVDTSKSQFSLTLISVTAADTAVYYCARHGYDSFDYWGQGTLVTVSS

SEQ ID NO: 4199 - protein, 119 aa, synthetic construct
QVQLQESGPGLVKPSETLSLTCTVSGGSISSSSYYWGWIRQPPGKGLEWIGNIFYSGNTYYNPSLKSRVTISVDTSQNQFSLKLTSVTAADTAVYYCARHYFSSSFDYWGQGTLVTVSS

SEQ ID NO: 4200 - protein, 121 aa, synthetic construct
EVQLVQSGAEVKKPGASVKVSCKASGYSFLSYVVSWVRQAPGQGLEWMGWITPYNGNTNYAQNLQDRVTMTTDTSTNTAYMELRSLRSDDTAVYYCASKGPTNYYSYMDVWGKGTTVTVSS

SEQ ID NO: 4201 - protein, 117 aa, synthetic construct
QVQLVQSGGGVVQPGRSLRLSCAASGFTFSGHDMHWVRQAPGKGLEWVGVIWYDGSNKYYGDSVKGRFTISRDNSKNTLYLQMNSLRAEDTAVYYCARKTQFGFDYWGQGTTVTVSS

SEQ ID NO: 4202 - protein, 120 aa, synthetic construct
EVQLVESGGGLVKPGGSLRLSCAASGFTFSNYAMHWVRQAPGKGLEWVAVIWYDGSNKYYADSVKGRFTISRDNSKNTGYLQMNSLRAEDTAVYYCATLAADAPKWFDPWGQGTLVTVSS

SEQ ID NO: 4203 - protein, 123 aa, synthetic construct
QVQLQESGPGLVKPSETLSLTCTVSGGSISSSSYYGGWIRQPPGKGLEWIGSIYYSGSTYYNPSLKSRVTISGDTSKNQFSLKLSSVTAADTAVYYCARLYNWNYGGGFFDYWGRGTLVTVSS

SEQ ID NO: 4204 - protein, 124 aa, synthetic construct
QLQLQESGPGLVKPSQTLSLTCTVSGGSVSSGGYYWSWIRQYPGKGLEWIGYIHHRGTTYFNPSLKSRVTMSLDTSKNQFSLKLSSVTAADTAVYYCAGMVRGIPLYYYFMDVWGKGTTVTVSS

SEQ ID NO: 4205 - protein, 124 aa, synthetic construct
QVQLQESGPGLVKPSQTLSLTCTVSDGSISSGVYYWSWIRQHPGKGLEWIGYISNSETTYYNPSLKSRVTISVDTSKNQFSLNLTSVTAADTAVYYCARMVRGLDYYYYYMDVWGKGTLVTVSS

SEQ ID NO: 4206 - protein, 124 aa, synthetic construct
QVQLQESGPGLVKPSGTLSLTCAVSGGSISSGDYYWSWIRQHPGKGLDWIGYIYYRGTTYYNPSLKSRVTISADTSKNQFSLKLSSVTAADTAVYYCARMVRGLKYYYYYMDVWGKGTTVTVSS

SEQ ID NO: 4207 - protein, 124 aa, synthetic construct
QVQLVESGPGLVKPSQTLSLTCTVSGGSISSGDYYWSWIRQHPGKGLEWIGYIYYRGTTYYNPSLKSRVAISVDTSKNQFSLKLSSVTAADTAVYYCARMVRGLNYYYYHMDVWGKGTTVTVSS

SEQ ID NO: 4208 - protein, 123 aa, synthetic construct
QLQLQESGPGLVKPSQTLSLTCTVSGGSLSSGDYYWSWIRQHPGKGLEWIGYISYIGTTYYNPSLKSRVTISEDTSKNQFSLKLSSVSAADTAVYYCARMVRGLNYYYYMDVWGKGTTVTVSS

SEQ ID NO: 4209 - protein, 124 aa, synthetic construct
QVQLVESGPGLVKPSQTLSLTCAVSGGSISSGDYYWSWIRQLPGKGLEWIGYIYYRGTTFYNPSLKSRVTISGDTSKNQFSLKLNSVTAADTAVYYCARMVRGLNYYYYYMDAWGKGTTVTVSS

SEQ ID NO: 4210 - protein, 124 aa, synthetic construct
QVQLQESGPGLVKPSQTLTLTCTVSGGSITSGDYYWSWIRQHPGKGLEWIGYIYYRGTTYYNPSLKSRVTISLDTSKNQFSLKLSSVTAADTAVYYCARMVRGLNYYYYYMDVWGKGTTVTVSS

SEQ ID NO: 4211 - protein, 124 aa, synthetic construct
QVQLQESGPGLVKPSQTLSLICTVSGDSISSGDYYWSWIRQHPGKGLEWIGYIYYRGTTYYNPSLKSRVTISADTSKNQFSLKLSSVTAADTAVYYCARMVRGLNYYYYYMDVWGKGTTVTVSS

SEQ ID NO: 4212 - protein, 123 aa, synthetic construct
QLQLQESGPGLVKPSQTLSLTCTVSGGSISSNGYYWTWIRQHPGRGLEWIGYMSYIGTTYSNPSLKSRVSISGDTSDNQFSLSLTSVTAADTAVYYCARMVRGLTYYYYMDVWGKGTTVTVSS

SEQ ID NO: 4213 - protein, 124 aa, synthetic construct
QVQLVESGPGLVKPSQTLSLTCTVSGGSISSGVYYWSWIRQHPGKGLEWIGYISYSGTTYYNPSLKSRVTISEDTSKNQFSLKLSSVSAADTAVYYCARMVRGVDYYYYYMDVWGKGTTVTVSS

SEQ ID NO: 4214 - protein, 123 aa, synthetic construct
QVQLQESGPGLVKPSQTLSLTCTVSDGSISSGVYYWSWIRQHPGKGLEWIGYISNSGTTYYNPSLKSRVTISVDTSKNQFSLKLSSVTAADTAVYYCARMVRGVNYYYYMDVWGKGTTVTVSS

SEQ ID NO: 4215 - protein, 124 aa, synthetic construct
QLQLQESGPGLVKPSQTLSLTCTVSDGSISSGVYYWSWIRQHPGKGLEWIGYISNSGTTYYNPSLKSRVTISVDTSKNQFSLKLSSVTAADTAVYYCARMVRGVNYYYYYMDVWGKGTTVTVSS

SEQ ID NO: 4216 - protein, 118 aa, synthetic construct
QVQLQESDAGLVRPSETLSLTCTVSGDSIRRTNYYWAWIRQPPGKGLEWIGNIYYSGDTYYNPSLKSRVTMSVDTSKNQFSLKLSSVTAADTAVYYCARNGYDSFDYWGQGTLVTVSS

SEQ ID NO: 4217 - protein, 126 aa, synthetic construct
QVQLVQSGGGLVKPGGSLRLSCEASGFTFSTYSMNWVRQAPGKGLEWVSSIGGSSSYTYYADSVKGRFTISRDNAKNSLYLQMNSLRAEDTAVYYCARQGYYDSSGYYFPDAFDIWGQGTMVTVSS

SEQ ID NO: 4218 - protein, 118 aa, synthetic construct
QLQLQEWGAGLLKPSETLSLTCAVYGGSLSGYYWSWIRQPPGKGLEWIGEINHYGSTNYNPSLKSRVTISADTSKNQFSLRLNSVTAADTAVYYCARQNWNYEGFDYWGQGTLVTVSS

SEQ ID NO: 4219 - protein, 119 aa, synthetic construct
EVQLVQSGAEVKKPGESLKISCKGSGYSFTSYWIGWVRQMPGKGLEWMGIIYPGDSATRYSPSFQGQVTISVDKSINTAYLQWGSLKASDTAMYYCVRQPLNYDWFDPWGQGTLVTVSS

SEQ ID NO: 4220 - protein, 120 aa, synthetic construct
EVQLVQSGAEVKKPGASLKVSCKASGYNFKSFGFSWMRQAPGQGLEWMGWTSGYNGITKYSQMFQDRLTLTSDTSTSTVYMEMRSLRSDDTAVYYCASRDNWNYDAFDLWGQGTMVTVSS

SEQ ID NO: 4221 - protein, 118 aa, synthetic construct
QVQLQESGPGQVKPSETLSLTCTVSDGSISSSTFYWGWIRQPPGKGLEWIGSIYYSGNTYYNPSLKSRVTLSVDKSKKQFSLKLSSVTAADTAVYYCARRDWNHIDYWGQGTTVTVSS

SEQ ID NO: 4222 - protein, 121 aa, synthetic construct
QITLKESGPALVKPTQTLTLTCTFSGFALTTSGEGVGWIRQPPGKALEWLALIYWNDDKRYSPSLKNRVAITKDTSKNQVVLTMANMDPVDTATYYCVHRGFKSRWYVDYWGQGTLVTVSS

SEQ ID NO: 4223 - protein, 121 aa, synthetic construct
QVTLRESGPTLVKPTQTLTLTCTFSGFSLTTSGEGVGWIRQPPGKAPEWLALIYWNDDKRYNPSLENRFTITKDTSKNQVILTMTNLDPVDTATYYCAHRGFRSRWYVDFWGQGTLVTVSS

SEQ ID NO: 4224 - protein, 125 aa, synthetic construct
QVQLQESGPGLVKPSETLSLTCTVSGGSISSTGFFWGWIRQPPGKGLDWIGSIYYSGNTYYNPSLKSRVTISVDTSKNQFSLKLSSVTAADTAVYYCARRSPRWSSSGSDAFDIWGQGTMVTVSS

SEQ ID NO: 4225 - protein, 120 aa, synthetic construct
QVQLVQSGAEVKKPGVSVKVSCKASGYTFTSYGISWVRQAPGQGLEWMGWISAYDGDTNYAQKFQGRVNMTTDTFTSTAYMELRSLRSDDTAVYYCARRWNYEKGAFDIWGQGTMVTVSS

SEQ ID NO: 4226 - protein, 120 aa, synthetic construct
EVQLVQSGAEVKKPGASVKVSCKASGYNFTSYGISWVRQAPGQGLEWMGWTSGYNGITKYAQKFQDRLTMTSDTSTSTVYMELRSLRSDDTAVYYCASRYNWNYAAFDLWGQGTMVTVSS

SEQ ID NO: 4227 - protein, 120 aa, synthetic construct
EVQLVQSGAEVKKPGASVKVSCKASGYTFTNYGVSWVRQAPGQGLEWMGWIGANNAYTKYAQKLQGRVTMTTDTSTSTAYMDLRSLRSDDTAIYFCASRYNWNYDAFDIWGQGTMVTVSS

SEQ ID NO: 4228 - protein, 120 aa, synthetic construct
QVQLVQSGAEVKKPGASVKVSCKASGYTLTNYGVSWVRQAPGQGLEWMGWISAYNGDTNYAQKFQGRVTMTTDTSTSTAYMELRSLISDDTAVYYCARRYNWNYGIFDNWGQGTLVTVSS

SEQ ID NO: 4229 - protein, 120 aa, synthetic construct
QVQLVQSGAEVKKPGASVKVSCKASGYTFANYGISWVRQAPGQGLEWMGWISAYNGNTNYAQKFQGRVTLTTDTSTSTAYMELRSLRSDDTAVYYCARRYNWNYGILDYWGQGTLVTVSS

SEQ ID NO: 4230 - protein, 120 aa, synthetic construct
EVQLVQSGAEVKKPGASVKVSCKASGYTFTSYGITWVRQAPGQGLEWMGWISVYNGDTNYAQNLQGRVTMTTDTSTNTAYMELRSLRSDDTAMYYCARRYNWNYGLFDYWGQGTLVTVSS

SEQ ID NO: 4231 - protein, 120 aa, synthetic construct
QVQLVQSGAEVKNPGASVKVSCKASGYTLTNYGISWVRQAPGQGLEWMGWISAYNGDTNYAQKIQGRVTMTTDTSTSTAYMELRSLRSDDTAVYYCARRYNWNYGLLDYWGQGTLVTVSS

SEQ ID NO: 4232 - protein, 120 aa, synthetic construct
QVQLVQSGPEVKKPGASLKVSCKASGYNFTSFGINWVRQAPGQGLEWMGWTSGYNGITKYVEKFQDRLTMTSDTSTGTVYMELRSLRSDDTAVYYCASRYNWNYVAFDLWGQGTMVTVSS

SEQ ID NO: 4233 - protein, 120 aa, synthetic construct
QVQLQESGPGLVKPSGTLSLTCAVSGGSISNSNWWTWVRQPPGKGLEWIGEIYHSVNTNYNPSLKSRVTISVDKSKNQFSLNLSSVTAADTAVYYCARSPYGGNPYFDYWGQGTLVTVSS

SEQ ID NO: 4234 - protein, 118 aa, synthetic construct
EVQLVQSGAEVKKPGASVKVSCKASGYTFTGYYIHWVRQAPGQGLDWMGWINPYSGATNYAQKFQGRVTMTRDTSLSTAYMELSRLRSDDTAVYYCAKSRLPDAFDIWGPGTMVTVSS

SEQ ID NO: 4235 - protein, 115 aa, synthetic construct
EVQLVQSGAEVKKPGASVKVSCKASGYTFTNLGISWVRQAPGQGLEWMGWISPYNGFTNYAQKLQGRVTMTTDTSTSTAYMELRSLRSDDTAVYYCARTFPLDYWGQGTLVTVSS

SEQ ID NO: 4236 - protein, 115 aa, synthetic construct
QVQLVQSGAEVKKPGASVKVSCKASGYTFTNYGISWVRQAPGQGLEWMGWISAYNGNTNYAQKFQGRVTMTTDTSTNTAYMELRSLRSDDTAVYYCARTWNSDYWGQGTTVTVSS

SEQ ID NO: 4237 - protein, 115 aa, synthetic construct
QVQLVQSGAEVKKPGASVKVSCKASGYTFTNYGISWVRQAPGQGLEWMGWISVYNGYTKYSQKLQGRVTMTTDTSTNTAFMELRGLRSDDTAVYYCARTYAFDIWGQGTMVTVSS

SEQ ID NO: 4238 - protein, 116 aa, synthetic construct
EVQLVQSGAEVKKPGASVKVSCKASEYTFTSYNMHWVRQAPGQGLEWMGIIHPSGGSTNYAQKFQGRVTMTRDTSTSTVYLELSSLRSEDTAVYYCEAVGDYFDYWGQGTLVTVSS

SEQ ID NO: 4239 - protein, 122 aa, synthetic construct
EVQLVQSGAEVKKPGASVKVSCKASGYTFTTYGISWVRQAPGQGLEWMGWISAYYGNTNYAQKLQGRVTMTTDTSTSTAYMELRSLRSDDTAVYYCARVRYSSSWGWYFDLWGRGTLVTVSS

SEQ ID NO: 4240 - protein, 120 aa, synthetic construct
QVQLQQSGPGLVKPSQTLSLTCVISGDSVSSNSAAWNWIRQSPSRGLEWLGRTYYMSKWFTEYAVSVKRRITINADTSKNQFSLQLDSVTPEDTAVYYCARWDLGSLDYWGQGTLVTVSS

SEQ ID NO: 4241 - protein, 121 aa, synthetic construct
QVQLVESGPGLVKPSGTLSLTCAVSGDSISSNNWWSWVRQPPGKGLEWIGEIYHGGSTNYNPSLKSRVTMSVDKSKNQFSLKLTSVTAADTAVYYCARWNIELFRGYFDYWGQGTLVTVSS

SEQ ID NO: 4242 - protein, 121 aa, synthetic construct
QVQLQESGPGLVKPSGTLSLTCAVSGGSISGSDWWSWVRQPPGKGLEWIGEIFHSGSTNYNPSLKSRVNFSVDKSKNQFSLRLNSVTAADTAVYYCARWNIENFAGYFDLWGRGTMVTVSS

SEQ ID NO: 4243 - protein, 121 aa, synthetic construct
QVQLVESGPGLVQPSGTLSLTCAVSGDSISSSNWWSWVRQPPGKGLEWIGEIYHGGSTSYNPSLKSRITMSVDRSKNQFSLKLTSVTAADTAVYYCARWNITLFRGYFDYWGQGTLVTVSS

SEQ ID NO: 4244 - protein, 121 aa, synthetic construct
QVQLQESGPGLVKPSGTLSLTCAVSGGSISSSNWWSWVRQSPGKGLEWIGEIYHSGSTNYNPSLRSRVTISLDKSKNQFSLKLSSVTAADTAAYYCARWNIVGALGYFDLWGRGTLVTVSS

SEQ ID NO: 4245 - protein, 121 aa, synthetic construct
QLQLQESGPGLVKPSRTLSLTCAVSGGSISSTNWWNWVRQSPGKGLEWIGEIYHSGTTNHNPSLKSRVTMSVDKSKNQFSLQLSSVTAADTAVYYCAKYYYGSGSYAFDIWGQGTMVTVSS

SEQ ID NO: 4246 - protein, 107 aa, synthetic construct
AIRMTQSPSSVSASVGDRVTITCRASQGIRGWLAWYQQKPGKAPNLLIYSASSLQSGVPSRFSGSGSGTDFTLTISSLQPEDFATYYCQQSYSTPLTFGGGTKVEIK

SEQ ID NO: 4247 - protein, 107 aa, synthetic construct
DIQLTQSPSTLSASVGDRVTITCRASQSISSWLAWYQQKPGKAPKLLIYKASSLESGVPSRFSGSGSGTDFTLTIANLQPEDFATYYCQQSYSSPLTFGGGTKVEIK

SEQ ID NO: 4248 - protein, 111 aa, synthetic construct
QSVLTQPPSVSGAPGQRVTISCTGSSSNIGAGYDVHWYQQLPGTAPKLLIYGNSNRPSGVPDRFSGSKSGTSASLAITGLQAEDEADYYCQSYDSSLSGWVFGGGTQLTVL

SEQ ID NO: 4249 - protein, 107 aa, synthetic construct
DIQMTQSPSSLSASVGDRVTITCRASQGIRNDLGWYQQKPGKAPKLLIYAASSLQSGVPSRFSGSGSGTDFTLTISGLQPEDFATYYCLQDYNYPFTFGPGTKVDIK

SEQ ID NO: 4250 - protein, 111 aa, synthetic construct
QSVLTQPPSVSGAPGQRVTISCTGSSSNIGAGYDVHWYQQLPGTAPKLLIYGNSNRPSGVPDRFSGSTSGTSASLAITGLQAEDEADYYCQSYDSSLSGWVFGGGTKLTVL

SEQ ID NO: 4251 - protein, 112 aa, synthetic construct
QSVVTQPPSVSGAPGQRVTISCTGSSSNIGAGYDVHWYQQLPGTAPKLLIYGNSNRPSGVPDRFSGSKSGTSASLAITGLQAEDEADYYCQSYDSRLSGNWVFGGGTKVTVL

SEQ ID NO: 4252 - protein, 111 aa, synthetic construct
QSVLTQPPSVSGAPGQRVTISCTGSSSNIGAGYDVHWYQQLPGTAPKLLIYGNSNRPSGVPDRFSGSKSGTSASLAITGLQAEDEADYYCQSYDSSLSGYVFGTGTQLTVL

SEQ ID NO: 4253 - protein, 111 aa, synthetic construct
QSVLTQPPSVSGAPGQRVTISCTGSSSSIGAGYDVHWYQQLPGTAPKLLIYGNSNRPSGVPDRFSGSKSGTSASLAITGLQAEDEADYYCQSYDSSLSGWVFGGGTKLTVL

SEQ ID NO: 4254 - protein, 111 aa, synthetic construct
QSVLTQPPSVSGAPGQRVTISCTGSSSNIGAGYDVHWYQQLPGTAPKLLIYGNSNRPSGVPDRFSGSKSGTSASLAITGLQAENEADYYCQSYDSSLSGWVFGGGTKLTVL

SEQ ID NO: 4255 - protein, 111 aa, synthetic construct
QAVLTQPPSVSGAPGQRVTISCTGSSSNIVAGYDVHWYQQLPGTAPKLLIYGNTNRPSGVPDRFSGSKSGTSASLAITGLQAEDEADYYCQSYDSSLSGWVFGGGTKVTVL

SEQ ID NO: 4256 - protein, 111 aa, synthetic construct
QSVVTQPPSVSGAPGQRVTISCTGSSSNIGAGYDVHWYQQLPGTAPKLLIYGNSNRPSGVPDRFSGSKSGTSASLAITGLQAEDEADYYCQSYDSSLSGSVFGGGTQLIIL

SEQ ID NO: 4257 - protein, 111 aa, synthetic construct
QAVLTQPPSVSGAPGQRVTISCTGSSSNIGAGYDVHWYQQLPGTAPKLLIYGNSNRPSGVPDRFSGSKSGTSASLAITGLQAEDEADYYCQSYDSSLSGWVFGGGTQLTVL

SEQ ID NO: 4258 - protein, 111 aa, synthetic construct; identical to SEQ ID NO: 491

SEQ ID NO: 4259 - protein, 111 aa, synthetic construct
QAVLTQPPSVSGAPGQRVTISCTGSSSNIGAGYDVHWYQQLPGTAPKLLIYGNSNRPSGVPDRFSGPKSGTSASLAITGLQAEDEADYYCQSYDSSLSGWVFGGGTKVTVL

SEQ ID NO: 4260 - protein, 112 aa, synthetic construct
DVVMTQSPLSSPVTLGQPASISCRSSQSLVSSVGNTYLNWFQQRPGQSPRRLIYKVSDRDSGVPDRFSGSGSGTDFTLKISRVEAEDVGVYYCMQGTHWPPTFGQGTKLEIK

SEQ ID NO: 4261 - protein, 107 aa, synthetic construct
AIQMTQSPSFLSASVGDRVTITCRASQGIGSYLAWYQQKPGKAPKLLIYAASTLQSGVPSRFSGSGSGTEFTLTISSLQPEDFATYYCQQLNSYPLTFGGGTKLEIK

SEQ ID NO: 4262 - protein, 107 aa, synthetic construct
AIRMTQSPSFLSASVGDRVTITCRASQGISSYLAWYQQRPGKAPKLLIYAASTLQSGVPSRFSGSGSGTEFTLTISSLQPEDFATYYCQQFHSYPFTFGPGTKVEIK

SEQ ID NO: 4263 - protein, 112 aa, synthetic construct
DVVMTQSPLSLPVTLGQPASISCRSSQSLVYSYGNTYLNWFQQRPGQSPRRLIYKVSNRDSGVPDRFSGSGSGTDFTLKISRVEAEDVGVYYCMQGTYWPPTFGGGTKLEIK

SEQ ID NO: 4264 - protein, 107 aa, synthetic construct
DIQLTQSPSFLSASVGDRVTITCRASQGISSYLAWYQQKPGKAPKLLIYAASSLQGGVPSRFSGSGSGTDFTLTISSLQPEDSATYYCLQDYNYPLTFGGGTKLEIK

SEQ ID NO: 4265 - protein, 107 aa, synthetic construct
DIQLTQSPSFLSASVGDRVTITCRASQGISSYLAWYQQKPGKAPKLLIYAASTLQSGVPSRFSGSGSGTEFTLTISSLQPEDFATYYCQQLNSYPITFGQGTRLEIK

SEQ ID NO: 4266 - protein, 107 aa, synthetic construct
AIQMTQSPSFLSASVGDRVTTTCRASQGISSYLAWYQQKPGKAPKLLIYAASTLQSGVPSRFSGSGSGTEFTLTISSLQPEDFATYYCQQLNSYPLTFGGGTKLEIK

SEQ ID NO: 4267 - protein, 107 aa, synthetic construct
EIVMTQSPATLSLSPGERATLSCRASQSVSSYLAWYQQKPGQAPRLLIYDASNRATGIPARFSGSGSGTDFTLTISSLEPEDFAVYYCQQRSNWPYTFGQGTKLEIK

SEQ ID NO: 4268 - protein, 106 aa, synthetic construct
QAGLTQPPSVSVSPGQTASITCSGDKLGSKYAFWYQQKPGQSPVVVIYQDNKRPSGIPERFSGSNSGNTATLTISGTQAIDEADYYCQAWDGSSAVFGGGTKVTVL

SEQ ID NO: 4269 - protein, 106 aa, synthetic construct
SYELTQPLSVSVALGQTARITCGGNNIGSENVYWYQQKPGQAPVVVIYRDSNRPSGIPERFSGSNSGNTATLTISRAQAGDEADYYCQVWDSSTVVFGGGTKLTVL

SEQ ID NO: 4270 - protein, 108 aa, synthetic construct
SYELTQPPSVSVSPGQTARITCSGDALPKKYAYWYQQKSGQAPVLVIYEDSKRPSGIPERFSGSSSGTMATLTISGAQVEDEADYYCYSTDSSGNHYVFGTGTKLTVL

SEQ ID NO: 4271 - protein, 112 aa, synthetic construct
DIVMTQTPLSLPVTLGQPASISCRSSQSLVYSDGNTYLNWFQQRPGQSPRRLIYKVSNRDSGVPDRFSGSGSGTDFTLKISRVEAEDVGVYYCMQGTHWPRTFGQGTKVDIK

SEQ ID NO: 4272 - protein, 112 aa, synthetic construct
DVVMTQSPLSLPVTLGQPASISCRSSQSLVYSDGNTYLNWFQQRPGQSPRRLIYKVSNRDSGVPDRFSGSGSGTDFTLKISRVEAEDVGVYYCMQGTHWPRTFGQGTKLEIK

SEQ ID NO: 4273 - protein, 111 aa, synthetic construct
QSALTQPASVSGSPGQSITISCTGTSSDVGGYNYVSWYQQHPGKAPKLMIYEVSNRPSGVSNRFSGSKSGNTASLTISGLQAEDEADYYCSSYTSSSTLVVFGGGTQVTVL

SEQ ID NO: 4274 - protein, 110 aa, synthetic construct; identical to SEQ ID NO: 349

SEQ ID NO: 4275 - protein, 112 aa, synthetic construct
DIVMTQTPLSLPVTPGEPASISCRSSQSLLHSNGYNYLDWYLQRPGQSPQLLIYLGSNRASGVPDRFSGSASGTDFTLKISRVEAEDVGVYYCMQGLQTPWTFGQGTKVEIK

SEQ ID NO: 4276 - protein, 113 aa, synthetic construct
DIVMTQTPLSLPVTLGQPASISCRSSRSLVYSDGNTYLNWFQQRPGQSPRRLIYKVSNRDSGVPDRFSGSGSGRDFTLKISRVEAEDVGVYYCMQGTNWPPYTFGQGTKLEIK

SEQ ID NO: 4277 - protein, 108 aa, synthetic construct
QAGLTQPPSASGTPGQRVTISCSGSSSNIGRNPVYWYQQLPGTAPKLLIYDNNQRPSGVPDRFSGSKSGTSASLAISGLQSEDEGDYYCAAWDDSLEVFGGGTQLTVL

SEQ ID NO: 4278 - protein, 107 aa, synthetic construct
DIVLTQSPSSVSASVGDRVTITCRASQGIAGWLAWYQQKPGKAPKLLIYSASSLQSGVPSRFSGSGSGTDFTLTISSLQPEDFATYYCQQANSFPRTFGQGTKLEIK

SEQ ID NO: 4279 - protein, 112 aa, synthetic construct
QAVLTQPPSVSGAPGQRVTISCTGSSSNIGAGYDVHWYQQLPGTAPKLLIYGNSNRPSGVPDRFSGSKSGTSASLAITGLQAEDEADYYCQSYDSSLSGSMVFGGGTKVTVL

SEQ ID NO: 4280 - protein, 106 aa, synthetic construct
DIVMTQSPSTLSASVGDRVTITCRASQSISNWLAWYQQKPGKAPKLLIYKASSLQSGVPSRFSGSGSGTEFTLTISSLQPDDFATYYCQQYKSFITFGQGTRLEIK

SEQ ID NO: 4281 - protein, 106 aa, synthetic construct
QAGLTQPPSVSVSPGQTASITCSGDKLGDKYVSWYQQTPGQSPVLVIYQDSERPSGIPERFSGSNSGNTATLTISGTQAMDEADYYCQAWDSSTVVFGGGTKLTVL

SEQ ID NO: 4282 - protein, 110 aa, synthetic construct
QAGLTQPPSASGTPGQRVTISCSGSSSNIGSNTVNWYQQLPGTAPKLLIYSNNQRPSGVPDRFSGSKSGTSASLAISGLQSEDEADYYCAAWDDSLNGVVFGGGTKVTVL

SEQ ID NO: 4283 - protein, 107 aa, synthetic construct
DIQMTQSPSSLSASVGDRVTITCRASQSISSYLNWYQQKPGKAPKLLIYAASSLQSGVPSRFSGSGSGTDFTLTISSLQPEDFATYYCQQSYSTPLTFGQGTRLEIK

SEQ ID NO: 4284 - protein, 108 aa, synthetic construct
QAGLTQPPSVSVAPGKTARITCGGNNIGSKSVHWYQQKPGQAPVLVIYYDSDRPSGIPERFSGSNSGNTATLTISRVEAGDEADYYCQVWDSSSDHVVFGGGTQLTVL

SEQ ID NO: 4285 - protein, 107 aa, synthetic construct
DIQMTQSPSSLSASVGDRVTITCRASQSISSYLNWYQQKPGKAPKLLVYAASSLQSGVPSRFSGSGSGTDFTLTISSLQPEDFATYYCQQSYSTPITFGQGTRLEIK

SEQ ID NO: 4286 - protein, 110 aa, synthetic construct
SYVLTQPPSASGTPGQRVTISCSGSSSNIGSNTVNWYQQLPGTAPKLLIYSNNQRPSGVPDRFSGSKSGTSASLAISGLQSEDEADYYCAAWDDSLNGYVFGTGTQLTVL

SEQ ID NO: 4287 - protein, 110 aa, synthetic construct
QSALTQPPSASGTPGQRVTISCSGSSSNIGSNTVNWYQQLPGTAPKLLIYSNNQRPSGVPDRFSGSKSGTSASLAISGLQSEDEADYYCAAWDDSLNGYVFGTGTQVTVL

SEQ ID NO: 4288 - protein, 110 aa, synthetic construct
QAVLTQPRSVSGSPGQSVTISCTGTSSDVGGYNYVSWYQQHPGKAPKLMIYDVSKRPSGVSNRFSGSKSGNTASLTISGLQAEDEADYYCSSYTSSSTLVFGGGTKLTVL

SEQ ID NO: 4289 - protein, 111 aa, synthetic construct; identical to SEQ ID NO: 4248

SEQ ID NO: 4290 - protein, 108 aa, synthetic construct
SYVLTQPPSVSVSPGQTARITCSGDALPKKYAYWYQQKSGQAPVLVIYEDSKRPSGIPERFSGSSSGTMATLTISGAQVEDEADYYCYSTDSSGNHRVFGGGTKVTVL

SEQ ID NO: 4291 - protein, 111 aa, synthetic construct
QSVLTQPPSVSGAPGQRVTISCTGSSSNIGSGYDVHWYQQLPGTAPKLLIYGNSNRPSGVPARFSGSKSGTSASLAITGLQAEDEADYYCQSYDSSLSGWVFGGGTKVTVL

SEQ ID NO: 4292 - protein, 107 aa, synthetic construct
AIQMTQSPSSLSPSVGDRVTITCRASQGIRNDLGWYQQKPGKAPKLLIYAASTLQSGVPSRFSGSGSGTEFTLTISSLQPEDFATYYCQQLNSYPITFGQGTRLEIK

SEQ ID NO: 4293 - protein, 107 aa, synthetic construct
AIRMTQSPSFLSASVGDRVTITCRASQGISSYLAWYQQKPGKAPNLLLYAASTLQSGVPSRFSGSGSGTDFTLTISSLQPEDFATYYCQQLNSYPFTFGQGTKVDIK

SEQ ID NO: 4294 - protein, 107 aa, synthetic construct
DIQMTQSPSFLSASVGDRVTITCRASQGISSYLAWYQQKPGKAPKLLIYAASTLQSGVPSRFSGSGSGTEFTLTISSLQPEDFATYYCQQLNSYPHTFGQGTKLEIK

SEQ ID NO: 4295 - protein, 107 aa, synthetic construct
AIRMTQSPSSLSASIGDRVTITCRASQGIRNDLGWYQQKPGKAPKRLIYAASSLQSGVPSRFSGSGSGTEFTLTISSLQPEDFATYYCLQLNSYPLTFGGGTKVDIK

SEQ ID NO: 4296 - protein, 108 aa, synthetic construct
EIVMTQSPATLSLSPGETVTLSCRASQSVSRYLAWYQQKPGQPPRLLIYDASNRATGIPARFSGSGSGTDFTLTISSLEPEDFAVYYCQQRSNWPPITFGQGTKLEIK

SEQ ID NO: 4297 - protein, 112 aa, synthetic construct
DVVMTQSPLSLPVTLGQPASISCRSSQSLVYSDGNTYLNWFQQRPGQSPRRLIYKVSNRDSGVPDRFSGSGSGTDFTLKISRVEAEDVGVYFCMQGTHWPFTFGPGTKVEIK

SEQ ID NO: 4298 - protein, 112 aa, synthetic construct
DVVMTQSPLSLPVTLGQPASISCRSSQSLVYSDGNTYLNWFQQRPGQSPRRLIYKVSNRDSGVPDRFSGSGSGTDFTLKISRVEAEDVGVYYCMQGTHWPFTFGPGTKVEIK

SEQ ID NO: 4299 - protein, 107 aa, synthetic construct
EIVMTQSPATLSLSPGERATLSCRASQSVSSNLAWYQQKPGQAPRLLIYGASTRATGIPARFSGSGSGTEFTLTISSLEPEDFAVYYCQQRSNWPLTFGGGTKLEIK

SEQ ID NO: 4300 - protein, 107 aa, synthetic construct
EIVMTQSPATLSLSPGERATLSCRASQSVHKYLAWYQQKPGQAPRLLIYDASSRATGIPARFSGSGSGTDFTLTISSLEPEDFAVYYCQQRSNWPLTFGGGTKVEIK

SEQ ID NO: 4301 - protein, 111 aa, synthetic construct
QSVLTQPPSVSGAPGQRVTISCTGSSSNIGAGYDVHWYQQLPGTAPKLLIYGNSNRPSGVPDRFSGSKSGTSASLAITGLQAEDEADYYCQSYDSSLSGYVFGTGTKLTVL

SEQ ID NO: 4302 - protein, 111 aa, synthetic construct; identical to SEQ ID NO: 4301

SEQ ID NO: 4303 - protein, 107 aa, synthetic construct
QAGLTQPPSVSVSPGQTASITCSGDKLGNKYASWYQQKPGQSPVLVIYQDRKRPSGIPERFSGSNSGNTATLTISGTQAMDEADYYCQAWDSSTYVIFGGGTKVTVL

SEQ ID NO: 4304 - protein, 111 aa, synthetic construct
QSVVTQPPSVSGAPGQRVTISCTGSSSNIGAGYDVHWYQQLPGTAPKLLIYGNGNRPSGVPDRFSGSKSGTSASLAITGLQAEDEADYYCQSYDSSLSGYVFGTGTKLTVL

SEQ ID NO: 4305 - protein, 107 aa, synthetic construct
DIQMTQSPSFLSASVGDRVTITCRASQGISSYLAWYQQKPGKAPKLLIYAASTLQSGVPSRFSGSGSGTEFTLTISSLQPEDFATYYCQQLNSYPLTFGGGTKLEIK

SEQ ID NO: 4306 - protein, 107 aa, synthetic construct
DIQLTQSPSSLSASVGDRVTITCRASQSISSYLNWYQQKPGKAPKLLIYAASSLQSGVPSRFSGSGSGTDFTLTISSLQPEDFATYYCQQSYSTPFTFGPGTKVDIK

SEQ ID NO: 4307 - protein, 107 aa, synthetic construct
DIQLTQSPSSLSASVGDRVTITCRAGQSISSYLNWYQQKPGKAPKVLIYAASSLQSGVPSRFSGSGSGTDFTLTISSLQPEDFATYYCQQSYSTPFTFGPGTKLEIK

SEQ ID NO: 4308 - protein, 107 aa, synthetic construct
DIQLTQSPSSLSASLGDRVTITCRASQSISSYLNWYQQKPGKAPKLLIFAASSLQSGVPSRFSGSGSGTDFTLTISSLQPEDFATYFCQQSYSTPFTFGPGTKVEIK

SEQ ID NO: 4309 - protein, 107 aa, synthetic construct
DIQLTQSPSSLSASVGDRVTITCRASQSISSYLNWYQQKPGKAPELLIYAASSLQGGVPSRFSGSGSGTDFTLTISSLQPEDFATYYCQQSYSTPLTFGGGTKVEIK

SEQ ID NO: 4310 - protein, 107 aa, synthetic construct
QAGLTQPPSVSVSPGQTASITCSGDKLGNKYASWYQQKPGQSPVLVIYQDSKRPSGIPERFSGSNSGNTATLTISGTQAMDEADYYCQAWDSSTAVVFGGGTQLTVL

SEQ ID NO: 4311 - protein, 107 aa, synthetic construct
QAGLTQPPSVSVSPGQTASITCSGDKLGDKYVSWYQQKPGQSPVMVIYQDRKRPSGIPERFSGSNSGNTATLTISGTQAMDEADYYCQAWDSSTAVVFGGGTKLTVL

SEQ ID NO: 4312 - protein, 107 aa, synthetic construct
QAGLTQPPSVSVSPGQTASITCSGDKLGYKYASWYQQKPGQSPVLVIYQDRKRPSGIPERFSGSNSGNTATLTISGAQSMDEADYYCQAWDSSTAVVFGGGTKVTVL

SEQ ID NO: 4313 - protein, 107 aa, synthetic construct
DIVMTQSPSSLSASVGDRVTITCRASQSISSYLNWYQQKPGKAPKLLIYAASSLQSGVPSRFSGSGSGTDFTLTISSLQPEDFATYYCQQSYSTPLTFGGGTKVEIK

SEQ ID NO: 4314 - protein, 107 aa, synthetic construct
DIQLTQSPSSLSASVGDRVTITCRASQSISSYLNWYQQKPGKAPKLLIYAASSLQSGVPSRFSGSGSGPDFTLTISSLQPEDFATYYCQQSYSPPLTFGGGTKLEIK

SEQ ID NO: 4315 - protein, 107 aa, synthetic construct
DIVMTQSPSSLSASVGDRVTITCRASQSIGSYLNWYQQKPGKAPKFLIYGASGLQSGVPSRFSGSGSGTDFTLTISSLQTEDFATYYCQQSFSTPFTFGPGTKVDIK

SEQ ID NO: 4316 - protein, 107 aa, synthetic construct
DIQLTQSPSSLSASVGDRVTITCRASRNIGTYLNWYQQKPGKAPNLLIYAASSLQSGVPSRFGGSGSGTDFTLSISSLQPEDFATFYCQQSFSTPYTFGQGTKVDIK

SEQ ID NO: 4317 - protein, 107 aa, synthetic construct
AIQMTQSPSSLSASVGDRVTITCRASQSISNYLNWYQQKPGKAPKLLIYAASSLQSGVPSRFSGSASGTDFTLTISGLQPEDFATYYCQQTYSTPLTFGGGTKLEIK

SEQ ID NO: 4318 - protein, 110 aa, synthetic construct
QSALTQPASVSGSPGQSITISCTGTSSDVGGYNYVSWYQQHPGKAPKLMIYEVSNRPSGVSNRFSGSKSGNTASLTISGLQAEDEADYYCSSYTSSSTVVFGGGTKVTVL

SEQ ID NO: 4319 - protein, 106 aa, synthetic construct
DIQLTQSPSSLSASVGDRVTITCRASQSISSYLNWYQQKPGKAPKLLIYAASSLQSGVPSRFSGSGSGTDFTLTISSLQPEDFATYYCQQSYSALTFGGGTKLEIK

SEQ ID NO: 4320 - protein, 112 aa, synthetic construct
DIVMTQTPLSLPVTLGQPASISCRSSQSLVYSDGNTYLNWFQQRPGQSPRRLIYEVSNRDSGVPDRFSGSGSGTDFTLKISRVEAEDVGVYYCMQGTHWPYTFGQGTKLEIK

SEQ ID NO: 4321 - protein, 107 aa, synthetic construct
DIQMTQSPSSLSASVGDRVTISCRASQTIISYLNWYQQKPGNAPKLLIYAASSLHSGVPSRFSGSGSGTDFTLTISSLQPDDFATYYCQQSYSTPITFGQGTRLEIK

SEQ ID NO: 4322 - protein, 107 aa, synthetic construct
DIQMTQSPSSLSASVGDRVTITCRASQSISSYLNWYQQKPGKAPELLIYAASSLQGGVPSRFSGSGSGTDFTLTISSLQPEDFATYYCQQSYSTPLTFGGGTKLEIK

SEQ ID NO: 4323 - protein, 107 aa, synthetic construct
DIVLTQSPSSLSASVGDRVTITCRASQSISSYLNWYQQKPGKAPKLLIYAASSLQSGVPSRFTGSGSGTDFTLTISSLQPEDFATYFCQQSYSPPLTFGGGTKVDIK

SEQ ID NO: 4324 - protein, 107 aa, synthetic construct
AIQMTQSPSSLSASVGDRVTITCRASQSISSYLNWYQQKPGKAPKLLIYAASSLQSGVPSRFSGSGSGTDFTLTISSLQPEDFATYYCQQSYSTPLTFGGGTKVDIK

SEQ ID NO: 4325 - protein, 107 aa, synthetic construct
AIRMTQSPSSLSASVGDRVTITCRASQSISSYLNWYQQKPGKAPKLLIYAASSLQSGVPSRFSGSGSGTDFTLTISSLQPEDFAGYYCQQSYSTPLTFGGGTKVEIK

SEQ ID NO: 4326 - protein, 107 aa, synthetic construct; identical to SEQ ID NO: 4313

SEQ ID NO: 4327 - protein, 107 aa, synthetic construct
DIVMTQSPSSLSASVGDRVTITCRASQSISSYLNWYQEKPGKAPKLLIYAASSLQTGVPSRFSGSGSGTDFTLTISSLQSEDFATYYCQQSYSTPLTFGGGTKVDIK

SEQ ID NO: 4328 - protein, 107 aa, synthetic construct
DIVLTQSPSSLSASVGDRVTITCRASQSISTYLNWYQQKPGKAPKLLIYAASSLQSGVPSGFSGSGSGTDFTLTISSLRPEDFATYYCQQSYSTPITFGQGTRLEIK

SEQ ID NO: 4329 - protein, 111 aa, synthetic construct
QSVLTQPPSVSGAPGQRVTISCTGSSSNIGAGYDVHWYQQLPGTAPKLLIYGNSNRPSGVPDRFSGSKSGTSASLAITGLQAEDEADYYCQSYDSSLSGWVFGGGTKVTVL

SEQ ID NO: 4330 - protein, 111 aa, synthetic construct
QPVLTQPPSVSGAPGQRVTISCTGSSSNIGAGYDVHWYQQLPGTAPKLLIYGNSNRPSGVPDRFSGSKSDTSASLAITGLQAEDEADYYCQSYDSSLSGWVFGGGTKVTVL

SEQ ID NO: 4331 - protein, 107 aa, synthetic construct
AIQMTQSPSTLSASVGDRVTITCRASQSISSYLNWYQQKPGKAPKLLIYAASSLQSGVPSRFSGSGSGTGFTLTISSLQPEDFATYYCQQTYSTPLTFGGGTKVEIK

SEQ ID NO: 4332 - protein, 107 aa, synthetic construct
DIQLTQSPSTLSASVGDRVTITCRASQSISTYLNWYQQKPGKAPKLLIYAASSLQSGVPSRFSGSGSGTDFTLTISSLQPEDFATYYCQQSYSTPLTFGGGTKLEIK

SEQ ID NO: 4333 - protein, 107 aa, synthetic construct
DIVMTQSPSSLSASVGDRVTITCRASQGISNYLAWYQQKPGKVPKLLIYAASTLQSGVPSRFSGSGSGTDFTLTISSLQPEDFATYYCQQANSFPPTFGQGTKVDIK

SEQ ID NO: 4334 - protein, 107 aa, synthetic construct
AIQMTQSPSSLSASIGDRVTITCRASQSISSYLNWYQQKPGKAPKILIYGASRLQSGVPSRFSGSGSGTDFTLTISSLQPEDFATYYCQQSYSTPITFGQGTRLEIK

SEQ ID NO: 4335 - protein, 107 aa, synthetic construct
DIVMTQSPSSLSASIGDRVTITCRASQSISSYLNWYQQKPGKAPKILIYGASRLQSGVPSRFSGSGSGTDFTLTISSLQPEDFATYYCQQSYSTPITFGQGTRLEIK

SEQ ID NO: 4336 - protein, 107 aa, synthetic construct
AIRMTQSPSSVSASVGDRVTITCRASQNISSWLDWYQQKPGKAPTLLIYAASRLQSGVPSRFSGSGSGTDFTLTISSLQPEDFATYYCQQSYSTPLTFGGGTKVEIK

SEQ ID NO: 4337 - protein, 111 aa, synthetic construct
QSVVTQPPSVSGAPGQRVTISCTGTSSDVGGYNYVSWYQQHPGKAPKLMIYDVSKRPSGVPDRFSGSKSGNTASLTISGLQAEDEADYYCLSYDSSLSGSVFGGGTELTVL

SEQ ID NO: 4338 - protein, 111 aa, synthetic construct; identical to SEQ ID NO: 4257

SEQ ID NO: 4339 - protein, 111 aa, synthetic construct; identical to SEQ ID NO: 657

SEQ ID NO: 4340 - protein, 107 aa, synthetic construct
AIRMTQSPSSVSASVGDRVTITCRASQGISSWLAWYQQKPGKAPKLLIYAASRLQSGVPSRFSGSGSGTDFTLAISSLQPEDFATYYCQQSYSTPLTFGGGTKVDIK

SEQ ID NO: 4341 - protein, 107 aa, synthetic construct
DIVMTQSPSSLSASVGDRVTITCRASQTISSYLNWYQQKPGKAPELLIYAASSLQSGVPSRFSGSGSGTDFTLTISSLQPEDFATYYCQQSYGTPLTFGGGTKLEIK

SEQ ID NO: 4342 - protein, 107 aa, synthetic construct
AIQMTQSPSSLSASVGDRVTITCRASQSISSNLNWYQQKPGKAPKLLIYAASNLQTGVPSRFSGSGSGTDFTLTISSLQPEDFATYSCQQSYGLPLTFGGGTRLEIK

SEQ ID NO: 4343 - protein, 110 aa, synthetic construct
QSALTQPASVSGSPGQSITISCTGTSSDVGGYNYVSWYQQHPGKAPKLMIYEVNKRPSGVPDRFSGSKSGNTASLTVSGLQAEDEADYYCSSYAGSNNLVFGGGTKVTVL

SEQ ID NO: 4344 - protein, 107 aa, synthetic construct
SYVLTQPPSVSVSPGQTASITCSGDKLGNKYASWYQQKPGQSPVLVIYQDSKRPSGIPERFSGSNSGNTATLTISGTQAMDEADYYCQAWDSSTAVVFGGGTKLTVL

SEQ ID NO: 4345 - protein, 107 aa, synthetic construct
SYVLTQPPSVSVAPGKTASITCSGDKLGDKYASWYQQKPGQSPVLVIYQDSKRPSGIPERFSGSNSGNIATLTISGTQAMDEADYYCQAWDSSTAVVFGGGTKLTVL

SEQ ID NO: 4346 - protein, 107 aa, synthetic construct
NFMLTQPPSVSVSPGQTASITCSGDKLGNKYVSWYQQKPGQSPVLVIYQDSKRPSGIPERFSGSNSGNTATLTISGTQAMDEADYYCQAWDSSTAVVFGGGTELTVL

SEQ ID NO: 4347 - protein, 108 aa, synthetic construct
NFMLTQPPSVSVAPGKTARITCGGNNIGSKSVNWYQQKPGQAPVLVIYYDSDRPSGIPERFSGFKSGNTATLTISRVEAGDEADYYCQVWDSSSDHVVFGGGTKVTVL

SEQ ID NO: 4348 - protein, 107 aa, synthetic construct
DIVMTQSPSSLSASVGDRVTITCRASQGISRWLDWYQQKPGKAPKLLIYAASSLQSGVPSRFSGSGSGTDFTLTISSLQPEDFATYYCQQSYSTPLTFGGGTKVEIK

SEQ ID NO: 4349 - protein, 107 aa, synthetic construct
DIVMTQSPSSVSASVGDRVTITCRASQAIRRWLAWYQQKPGKIPKLLIHSASSLHSGVPSRFSGSGSGTDFTLTISSLQPEDFATYYCQQSYSTPLTFGGGTKLEIK

SEQ ID NO: 4350 - protein, 107 aa, synthetic construct
DIQLTQSPSPLSASVGDRVTITCRASQSISSYLNWYQQKPGKAPKLLIYAASSLQSGVPSRFSGSGSGTDFTLTISSLQPEDFATYYCQQSYSTPLTFGGGTKVEIK

SEQ ID NO: 4351 - protein, 110 aa, synthetic construct
QAVLTQPRSVSGSPGQSVTISCTGTSSDVGGYNYVSWYQQHPGKAPKLMIYDVSKRPSGVSNRFSGSKSGNTASLTISGLQAEDEADYYCSSYAGRNNLVFGGGTQLTVL

SEQ ID NO: 4352 - protein, 107 aa, synthetic construct
AIQMTQSPSSLSASVGDRVTITCRASQSISRYLNWYQQRPGKAPKVLIYAASSLQSGVPSRFSGSGSGTDFTLTINSLQPEDFATYYCQQSYSTPLTFGGGTKVEIK

SEQ ID NO: 4353 - protein, 107 aa, synthetic construct
DIVMTQSPSSLSASVGDRVTITCRASQSIRSYLNWYQQKPGKAPKLLIYGASSLQRGVPSRFSGSGSGTEFTLTISSLQPEDFASYYCQQSYSSPLTFGGGTKVDIK

SEQ ID NO: 4354 - protein, 108 aa, synthetic construct; identical to SEQ ID NO: 4290

SEQ ID NO: 4355 - protein, 108 aa, synthetic construct
SYVLTQPPSVSVSPGQTARITCSGDALPKKYAYWYQQKSGQAPVLVIYEDSKRPSGIPERFSGSSSGTMATLTISGAQVEDEADYYCYSTDSSGNHRVFGGGTKLTVL

SEQ ID NO: 4356 - protein, 107 aa, synthetic construct
EIVMTQSPATLSLSPGERATLSCRASQSVSKYLAWYQQKPGQAPRLLIYDASNRATGIPARFSGSGSGTDFTLSISSLEPEDFAVYYCQQRSNWPLTFGGGTKLEIK

SEQ ID NO: 4357 - protein, 108 aa, synthetic construct
QSALTQPASVSGSPGQSITISCTGTSSDVGGYNYVSWYQQHPGKAPKLMIYEVSNRPSGVSNRFSGSKSGNTASLTISGLQAEDEADYYCCSYEGSWVFGGGTKLTVL

SEQ ID NO: 4358 - protein, 108 aa, synthetic construct
DIVLTQSPGTLSLSPGERATLSCRASQSVSSSYLAWYQQKPGQAPRLLIYGASSRATGIPDRFSGSGSGTDFTLTISRLEPEDFAVYYCQQYGSSPLTFGGGTKVEIK

SEQ ID NO: 4359 - protein, 111 aa, synthetic construct
QSVLTQPPSVSGAPGQRVTISCTGSSSKIGAGYDVHWYQQLPGTAPKLLIYGNSNRPSGVPDRFSGSKSGTSASLAITGLQAEDEADYYCQSYDSSLSGSVFGGGTKVTVL

SEQ ID NO: 4360 - protein, 108 aa, synthetic construct
QAVVTQDPAVSVALGQTVRITCQGDSLRNYYASWYQQRPGQAPVLVIYGNNNRPSGIPDRFSGSRSGNSASLTITGAQAEDEADYYCNSRDSSGNHVVFGGGTKVTVL

SEQ ID NO: 4361 - protein, 111 aa, synthetic construct; identical to SEQ ID NO: 4329

SEQ ID NO: 4362 - protein, 107 aa, synthetic construct
AIQMTQSPSSVSASVGDRVTITCRASQGLRNWLAWYQQKPGKAPNLLISAASGLQGGVPSRFSGSGSGTDFTLTISSLQPEDFATYYCQQANIFPLTFGGGTKLEIK

SEQ ID NO: 4363 - protein, 107 aa, synthetic construct
DIVMTQSPSSVSASVGDRVTISCRASQGISSWLVWYQQKPGKAPNLLIDAASSLQSGVPSRFSGSRSGTDFTLTISNLQPEDFATYYCQQANSFPLTFGGGTKLEIK

SEQ ID NO: 4364 - protein, 107 aa, synthetic construct
DIQLTQSPSSVSASVGDRVTITCRASQGISSWLAWYQQKPGKAPKLLIYAASSLQSGVPSRFSGSGSGTDFTLTISGLQPEDFATYYCQQANSFPLTFGGGTKVEIK

SEQ ID NO: 4365 - protein, 107 aa, synthetic construct
DIVMTQSPSSVSASVGDRVTITCRASQGISSWLAWYQQKPGKAPKLLIYAASSLQSGVPSRFSGSGSGTDFTLTISSLQPEDFATYYCQQANSFPLTFGGGTKVEIK

SEQ ID NO: 4366 - protein, 107 aa, synthetic construct
DIVMTQSPSSVSASVGDRVTITCRASQGISSWLAWYQQKPGKAPKLLIYAASSLQSGVPSRFSGSGSGTDFTLTISSLQPEDFATYYCQQANSFPITFGQGTRLEIK

SEQ ID NO: 4367 - protein, 107 aa, synthetic construct
DIQMTQSPSSVSASVGDRVTITCRASQGISSWLAWYQQKPGKAPKLLIYAASSLQSGVPSRFSGSGSGTDFTLTISSLQPEDFATYYCQQANSFPPTFGQGTKVDIK

SEQ ID NO: 4368 - protein, 107 aa, synthetic construct
DIVMTQSPSSVSASVGDRVTITCRASQGISSWLAWYQQKPGKAPKLLIYAASSLQSGIPSRFSGSGSGTDFTLTISSLQPEDFATYYCQQANSFPPTFGPGTKVEIK

SEQ ID NO: 4369 - protein, 107 aa, synthetic construct
DIQLTQSPSTLSASVGDRVTITCRASQGISSWLAWYQQKPGKAPKLLIYAASSLQSGVPSRFSGSGSGTDFTLTISSLQPEDFATYYCQQANSFPPTFGQGTKVDIK

SEQ ID NO: 4370 - protein, 107 aa, synthetic construct
DIQMTQSPSSVSASVGDRVTITCRASQGLSNWLAWYQQKPGEAPKLLISAASSLQSGVPSRFSGSGSGTEFTLTISSLQPEDFATYYCQQANGFPITFGGGTKLEIK

SEQ ID NO: 4371 - protein, 107 aa, synthetic construct
DIVMTQSPSSVSASVGDRVTITCRASQGISRWLAWYQQKPGKAPKLLIYAASSLQSGVPSRFSGSGSGTEFTLTISSLQPEDFATYYCQQANSFPLTFGGGTKLEIK

SEQ ID NO: 4372 - protein, 107 aa, synthetic construct
DIQLTQSPSSVSASVGDRVTITCRASQGLSNWLAWYQQKPGKAPNLLISAASGLQGGVPSRFSGSGSGTDFTLTISSLQPEDFASYYCQQANIFPLTFGGGTKVEIK

SEQ ID NO: 4373 - protein, 107 aa, synthetic construct; identical to SEQ ID NO: 3938

SEQ ID NO: 4374 - protein, 107 aa, synthetic construct
EIVMTQSPATLSLSPGERATLSCRASQSVSSYLAWYQQKPGQAPRLLIYDASNRATGIPARFSGSGSGTDFTLTISSLEPEDFAVYYCQQRSNWPLTFGGGTKLEIK

SEQ ID NO: 4375 - protein, 112 aa, synthetic construct
DVVMTQSPLSLPVTLGQPASISCRSSQSLVYSDGNTYLNWFQQRPGQSPRRLIYKVSNRDSGVPDRFSGSGSGTDFTLKISRVEAEDVGVYYCMQGTHWPFTFGPGTKLEIK

SEQ ID NO: 4376 - protein, 107 aa, synthetic construct
DIVMTQSPSSLSASVGDRVTITCRASQGIRNDLGWYQQKPGKAPKLLIYAASSLQSGVPSRFSGSGSGTDFTLTISSLQPEDFATYYCLQDYNYPYTFGQGTKLEIK

SEQ ID NO: 4377 - protein, 110 aa, synthetic construct
QPVLTQPASVSGSPGQSITISCTGTSSDVGGYNYVSWYQQHPGKAPKLMIYDVSKRSSGVSNRFSGSKSGNTASLTISGLQAEDEADYYCCSYAGSSTWVFGGGTKVTVL

SEQ ID NO: 4378 - protein, 107 aa, synthetic construct
DIVMTQSPSSLSASVGDRVTITCRASQSISSYLNWYQQKPGKAPKLLIYAASSLQSGVPSRFSGSGSGTDFTLTISSLQPEDFATYYCQQAYSFPYTFGQGTKLEIK

SEQ ID NO: 4379 - protein, 108 aa, synthetic construct; identical to SEQ ID NO: 3923

SEQ ID NO: 4380 - protein, 107 aa, synthetic construct
EIVMTQSPATLSLSPGERVTLSCRASQSIGSYLAWYQQKPGQAPRLLIYDASNRATGIPARFSGSGSGTDFTLTISSLEPEDFAVYYCQQRSNWPFTFGPGTKLEIK

SEQ ID NO: 4381 - protein, 107 aa, synthetic construct
EIVLTQSPATLSLSPGERATLSCRASQSVSSYLAWYQQKPGQAPRLLIYDASNRATGIPARFSGSGSGTDFTLTISSLEPEDFAVYYCQQRSNWPFTFGPGTKVEIK

SEQ ID NO: 4382 - protein, 110 aa, synthetic construct
QAVLTQPPSASGTPGQRVTISCSGSSSNIGSNTVNWYQQLPGTAPKLLIYSNNQRPSGVPDRFSGSKSGTSASLAISGLQSEDEADYYCAAWDDSLNGWVFGGGTKVTVL

SEQ ID NO: 4383 - protein, 107 aa, synthetic construct
AIRMTQSPSSLSASVGDRVTITCRASQISSRHLNWYQQKPGKAPKLLIYAASSLQGGVPSRFSGSGSGTDFTLTISSLQPEDFATYYCQQSYSTPFTFGPGTKLEIK

SEQ ID NO: 4384 - protein, 107 aa, synthetic construct
AIQMTQSPSSLSASVGDRVTITCRASQSISSYLNWYQQKPGKAPKLLIYAASSLQSGVPSRFSGSGSGTDFTLTISSLQPEDFATYYCQQSYSTPLTFGGGTKVEIK

SEQ ID NO: 4385 - protein, 107 aa, synthetic construct
AIQMTQSPSSLSASVGDRVTITCRASQSISSYLNWYQQKPGKAPKLLIYAASSLQSGVPSRFSGSGSGTDFTLTISSLQPEDFATYYCQQSYSTPLTFGGGTKLEIK

SEQ ID NO: 4386 - protein, 108 aa, synthetic construct
QAVVTQDPAVSVALGQTVRITCQGDSLRSYYASWYQQKPGQAPVLVIYGKNNRPSGIPDRFSGSSSGNTASLTITGAQAEDEADYYCNSRDSSGNHVVFGGGTKVTVL

SEQ ID NO: 4387 - protein, 108 aa, synthetic construct
QTVVTQDPAVSVALGQTVRITCQGDSLRSYYASWYQQKPGQAPVLVIYGKNNRPSGIPDRFSGSSSGNTASLTITGAQAEDEADYYCNSRDSSGNHVVFGGGTKLTVL

SEQ ID NO: 4388 - protein, 108 aa, synthetic construct
QTVVTQDPAVSVALGQTVRITCQGDSLRSYYASWYQQKPGQAPVLVIYGKNNRPSGIPDRFSGSSSGNTASLTITGAQAEDEADYYCNSRDSSGNHLVFGGGTKVTVL

SEQ ID NO: 4389 - protein, 108 aa, synthetic construct; identical to SEQ ID NO: 4387

SEQ ID NO: 4390 - protein, 107 aa, synthetic construct
DIQLTQSPSSLSASVGDRVTITCRASQSISSYLNWYQQKPGKAPKLLIYAASSLQSGVPSRFSGSGSGTDFTLTISSLQPEDFATYYCQQSYSTPLTFGGGTKVEIK

SEQ ID NO: 4391 - protein, 106 aa, synthetic construct
SYELTQPPTVSVSPGQTASITCSGDKLGDKYASWYQQKPGQSPVLVIYQDNKRPSGIPERFSGSNSGNTATLTISGTQAMDEADYYCQAWDSSTVVFGGGTKVTVL

SEQ ID NO: 4392 - protein, 107 aa, synthetic construct
DIQMTQSPSFLSASVGDRVTITCRASQNINSYLNWYQQKPGKAPNLLIYAASSLQSGVPSRFSGSGSRTDFTLTISSLQPEDFATYYCQQSYSTPITFGQGTRLEIK

SEQ ID NO: 4393 - protein, 107 aa, synthetic construct
DIQMAQSPSSLSASVGDRVTITCRASQSISSYLNWYQQKPGKAPKLLIYAASSLQSGVPSRFSGSGSGTDFTLTISSLQPEDFATYYCLQDSNYPLTFGGGTKVEIK

SEQ ID NO: 4394 - protein, 107 aa, synthetic construct
DIVMTQSPSSLSASVGDRVTITCRASQSISSYFNWYQQKPGKAPKLLIYAASSLQSGVPSRFSGSGSGTDFTLTISSLQPEDFATYYCQQTDSSPWTFGQGTKVDIK

SEQ ID NO: 4395 - protein, 107 aa, synthetic construct
DIQLTQSPSSLSASVGDRVTITCRASQSISSYLNWYQQKPGKAPKLLIHAASSSQSGVPSRFSGSGSGTDFTLTISSLQPEDFATYYCQQSYSTPFTFGPGTKVEIK

SEQ ID NO: 4396 - protein, 110 aa, synthetic construct
QSALTQPRSVSGSPGQSVTISCTGTSSDVGGYNYVSWYQQHPGKAPKLMIYDVSKRPSGVPDRFSGSKSGNTASLTISGLQAEDEADYYCCSYAGSYTWVFGGGTKVTVL

SEQ ID NO: 4397 - protein, 107 aa, synthetic construct
DIVMTQSPSSLSASVGDRVTITCRASQSISSYLNWYQQKPGKAPKLLIYAASSLQSGVPSRFSGSGSGTDFTLTISSLQPEDFATYYCQQSYSTPLTFGGGTKLEIK

SEQ ID NO: 4398 - protein, 112 aa, synthetic construct
DVVMTQSPLSLPVTLGQPASISCRSSQSLVYSDGNTYLNWFQQRPGQSPRRLIYKVSNRDSGVPDRFSGSGSGTDFTLKISRVEAEDVGVYYCMQGTHWPYTFGQGTKLEIK

SEQ ID NO: 4399 - protein, 107 aa, synthetic construct
DIVMTQSPSSLSASVGDRVTITCRASQSTSSYLNWYQQKPGKAPKLLIYAASSLQSGVPSRFSGSGSGTDFTLTISSLQPEDFATYYCQQSYSTPFTFGPGTKLEIK

SEQ ID NO: 4400 - protein, 107 aa, synthetic construct
AIRMTQSPSSLSASVGDRVTITCRASQSISSYLNWYQQKPGKAPKLLIFAASSLQSGVPSRFSGSGSETDFTLTISSLQPEDFASYYCQQSFSTPFTFGPGTKLEIK

SEQ ID NO: 4401 - protein, 107 aa, synthetic construct
AIRMTQSPSSLSASVGDRVTITCRASQSISSYLNWYQQKPGKAPKLLIYAASSLQSGVPSRFSGSGSGTDFTLTISSLQPEDFATYYCQQSYSTPFTFGPGTKLEIK

SEQ ID NO: 4402 - protein, 107 aa, synthetic construct
DIVMTQSPSSLSASVGDRVTITCRASQSISSYLNWYQQKPGKAPKLLIYAASSLQSGVPSRFSGSGSGTDFTLTISSLQPEDFATYYCQQSYSTPFTFGPGTKLEIK

SEQ ID NO: 4403 - protein, 110 aa, synthetic construct
QSALTQPASVSGSPGQSITISCTGTSSDVGGYNYVSWYQQHPGKAPKLMIYEVSNRPSGVSNRFSGSKSGNTASLTISGLQAEDEADYYCSSYTSSSTWVFGGGTKVTVL

SEQ ID NO: 4404 - protein, 17 aa, synthetic construct
CARAGPGIVAAGSFDYW

SEQ ID NO: 4405 - protein, 19 aa, synthetic construct
CARERGAARHYYYYYMDVW

SEQ ID NO: 4406 - protein, 17 aa, synthetic construct
CARGPGVYYYYYYMDVW

SEQ ID NO: 4407 - protein, 9 aa, synthetic construct
CVREELDHW

SEQ ID NO: 4408 - protein, 13 aa, synthetic construct
CARKRYRSNLDYW

SEQ ID NO: 4409 - protein, 14 aa, synthetic construct
CARARIAAPSFDYW

SEQ ID NO: 4410 - protein, 12 aa, synthetic construct
CARRAARCFDYW

SEQ ID NO: 4411 - protein, 8 aa, synthetic construct [sequence omitted]

SEQ ID NO: 4412 - protein, 8 aa, synthetic construct [sequence omitted]

SEQ ID NO: 4413 - protein, 15 aa, synthetic construct
CAREARSSGRGFDYW

SEQ ID NO: 4414 - protein, 15 aa, synthetic construct
CAKDKWELLRGFDYW

SEQ ID NO: 4415 - protein, 16 aa, synthetic construct
CARHKAAAGSYYFDYW

SEQ ID NO: 4416 - protein, 15 aa, synthetic construct
CARDRGRLGGVFDLW

SEQ ID NO: 4417 - protein, 13 aa, synthetic construct
CARKGYSSRWDYW

SEQ ID NO: 4418 - protein, 9 aa, synthetic construct
CVREELDHW

SEQ ID NO: 4419 - protein, 12 aa, synthetic construct
CAREGNWGFDYW

SEQ ID NO: 4420 - protein, 15 aa, synthetic construct
CARSHNWNYFYFDYW

SEQ ID NO: 4421 - protein, 13 aa, synthetic construct
CARAPVPGWFDPW

SEQ ID NO: 4422 - protein, 16 aa, synthetic construct
CARGMGAVAEDWFDPW

SEQ ID NO: 4423 - protein, 9 aa, synthetic construct
CASFITGTW

SEQ ID NO: 4424 - protein, 9 aa, synthetic construct
CAKLGFDYW

SEQ ID NO: 4425 - protein, 10 aa, synthetic construct
CAKNLFFDYW

SEQ ID NO: 4426 - protein, 11 aa, synthetic construct
CARDNWGIDYW

SEQ ID NO: 4427 - protein, 11 aa, synthetic construct
CAREVTSFDYW

SEQ ID NO: 4428 - protein, 13 aa, synthetic construct
CARDNWSSYFDYW

SEQ ID NO: 4429 - protein, 13 aa, synthetic construct
CARGIAARAFAYW

SEQ ID NO: 4430 - protein, 10 aa, synthetic construct
CAREGYLDYW

SEQ ID NO: 4431 - protein, 13 aa, synthetic construct
CARERNWGGFDYW

SEQ ID NO: 4432 - protein, 13 aa, synthetic construct
CARDYYFYYMDVW

SEQ ID NO: 4433 - protein, 13 aa, synthetic construct [sequence omitted]

SEQ ID NO: 4434 - protein, 11 aa, synthetic construct
CTTVNWAFDYW

SEQ ID NO: 4435 - protein, 13 aa, synthetic construct
CVRDNWNYGFDHW

SEQ ID NO: 4436 - protein, 13 aa, synthetic construct [sequence omitted]

SEQ ID NO: 4437 - protein, 13 aa, synthetic construct
CAREDSRNWFDPW

SEQ ID NO: 4438 - protein, 11 aa, synthetic construct
CTSTGTTFDYW

SEQ ID NO: 4439 - protein, 13 aa, synthetic construct
CARTSRVAAFDYW

SEQ ID NO: 4440 - protein, 13 aa, synthetic construct
CARDDLWITGDYW

SEQ ID NO: 4441 - protein, 13 aa, synthetic construct
CAREEQRNWFDPW

SEQ ID NO: 4442 - protein, 14 aa, synthetic construct
CARAYNWNGYFDYW

SEQ ID NO: 4443 - protein, 14 aa, synthetic construct
CARDSGDSYAFDLW

SEQ ID NO: 4444 - protein, 15 aa, synthetic construct [sequence omitted]

SEQ ID NO: 4445 - protein, 14 aa, synthetic construct
CARHDILTGYFDYW

SEQ ID NO: 4446 - protein, 14 aa, synthetic construct
CAWYSRDWSDFDYW

SEQ ID NO: 4447 - protein, 14 aa, synthetic construct
CARDRRELRAFDIW

SEQ ID NO: 4448 - protein, 10 aa, synthetic construct [sequence omitted]

SEQ ID NO: 4449 - protein, 15 aa, synthetic construct
CTGGSDSSHWYFDIW

SEQ ID NO: 4450 - protein, 14 aa, synthetic construct
CARRAWGYWYFDLW

SEQ ID NO: 4451 - protein, 15 aa, synthetic construct
CARAYSSSWTPLGYW

SEQ ID NO: 4452 - protein, 13 aa, synthetic construct
CARTDFWSGWDYW

SEQ ID NO: 4453 - protein, 15 aa, synthetic construct
CARSGYRYPFHFDYW

SEQ ID NO: 4454 - protein, 15 aa, synthetic construct
CAIDGLGQLVLFDYW

SEQ ID NO: 4455 - protein, 15 aa, synthetic construct
CAREGGIAAAGFDYW

SEQ ID NO: 4456 - protein, 15 aa, synthetic construct
CARSGYRYPYYFDYW

SEQ ID NO: 4457 - protein, 14 aa, synthetic construct
CTTDNWNYEDFDYW

SEQ ID NO: 4458 - protein, 15 aa, synthetic construct
CAREPQQWRYYFDYW

SEQ ID NO: 4459 - protein, 16 aa, synthetic construct
CAKARSGIVGATGDYW

SEQ ID NO: 4460 - protein, 15 aa, synthetic construct
CARGGNWNSDAFDIW

SEQ ID NO: 4461 - protein, 16 aa, synthetic construct
CARDRSGTTSWYFDLW

SEQ ID NO: 4462 - protein, 16 aa, synthetic construct
CARYCSSTSCYGFDPW

SEQ ID NO: 4463 - protein, 16 aa, synthetic construct
CARTEYSSSPEYFQHW

SEQ ID NO: 4464 - protein, 17 aa, synthetic construct
CAREGFWSGYYDAFDIW

SEQ ID NO: 4465 - protein, 15 aa, synthetic construct
CAHRGSGARDAFDIW

SEQ ID NO: 4466 - protein, 13 aa, synthetic construct
CARDGWTDAFDIW

SEQ ID NO: 4467 - protein, 16 aa, synthetic construct
CARESGYSGYDDFDYW

SEQ ID NO: 4468 - protein, 17 aa, synthetic construct
CARKAVAGYYYYYMDVW

SEQ ID NO: 4469 - protein, 16 aa, synthetic construct
CARDVGGNYYYNMDVW

SEQ ID NO: 4470 - protein, 17 aa, synthetic construct
CARGQQLVDYYYYMDVW

SEQ ID NO: 4471 - protein, 16 aa, synthetic construct
CAKERGTVVYGYFDLW

SEQ ID NO: 4472 - protein, 17 aa, synthetic construct
CARHRVTGTTFYYMDVW

SEQ ID NO: 4473 - protein, 16 aa, synthetic construct
CARQDRYNWNSPLDFW

SEQ ID NO: 4474 - protein, 15 aa, synthetic construct
CATLRGYTYGPFDYW

SEQ ID NO: 4475 - protein, 19 aa, synthetic construct
CARDVYSNSHYSYFYMDVW

SEQ ID NO: 4476 - protein, 17 aa, synthetic construct
CARDSLPDYGDFYLDNW

SEQ ID NO: 4477 - protein, 14 aa, synthetic construct
CVRERGYTDAFDIW

SEQ ID NO: 4478 - protein, 17 aa, synthetic construct
CAKDISHYVGWWYFDIW

SEQ ID NO: 4479 - protein, 20 aa, synthetic construct
CARGIAAAGGLYYYYYLDVW

SEQ ID NO: 4480 - protein, 15 aa, synthetic construct
CTRHLELRGNYFDYW

SEQ ID NO: 4481 - protein, 20 aa, synthetic construct
CASFYGDYVPHYYFYYMDVW

SEQ ID NO: 4482 - protein, 15 aa, synthetic construct
CAREGYNWNYDMDVW

SEQ ID NO: 4483 - protein, 20 aa, synthetic construct
CARIREYCTNGVCSYYFDYW

SEQ ID NO: 4484 - protein, 17 aa, synthetic construct
CARDPGGYYYSYNMDVW

SEQ ID NO: 4485 - protein, 23 aa, synthetic construct
CARGGGYCSSTSCYRYYYYMDVW

SEQ ID NO: 4486 - protein, 17 aa, synthetic construct
CARGYCSSTRCYPFDYW

SEQ ID NO: 4487 - protein, 17 aa, synthetic construct
CAKDMGFLEWLSYFDYW

SEQ ID NO: 4488 - protein, 17 aa, synthetic construct
CARGPRYNWNYGAFDYW

SEQ ID NO: 4489 - protein, 18 aa, synthetic construct
CARGGLELRKLYYYMDVW

SEQ ID NO: 4490 - protein, 16 aa, synthetic construct
CARDGFWSGYDWFDPW

SEQ ID NO: 4491 - protein, 18 aa, synthetic construct
CARGNRDYWDYYYYMDVW

SEQ ID NO: 4492 - protein, 19 aa, synthetic construct
CARDVYSNSHYSYFYMDVW

SEQ ID NO: 4493 - protein, 19 aa, synthetic construct
CARDDFWSGYYKLNGFDIW

SEQ ID NO: 4494 - protein, 18 aa, synthetic construct
CARDNWNSHYYYYYMDVW

SEQ ID NO: 4495 - protein, 14 aa, synthetic construct
CAGSWGELLYFDYW

SEQ ID NO: 4496 - protein, 16 aa, synthetic construct
CARGNVGPAGYHFDYW

SEQ ID NO: 4497 - protein, 20 aa, synthetic construct
CARDRSSWYDHYYYYYMDVW

SEQ ID NO: 4498 - protein, 21 aa, synthetic construct
CARGAYDYVWGNYRHDVFDIW

SEQ ID NO: 4499 - protein, 21 aa, synthetic construct
CAHKYCGGDCYYYYYYYMDVW

SEQ ID NO: 4500 - protein, 17 aa, synthetic construct
CARTPITGTTYWYFDLW

SEQ ID NO: 4501 - protein, 19 aa, synthetic construct
CARKYYDILTGYFNPFDYW

SEQ ID NO: 4502 - protein, 11 aa, synthetic construct [sequence omitted]

SEQ ID NO: 4503 - protein, 13 aa, synthetic construct [sequence omitted]

SEQ ID NO: 4504 - protein, 11 aa, synthetic construct [sequence omitted]

SEQ ID NO: 4505 - protein, 11 aa, synthetic construct [sequence omitted]

SEQ ID NO: 4506 - protein, 11 aa, synthetic construct [sequence omitted]

SEQ ID NO: 4507 - protein, 12 aa, synthetic construct [sequence omitted]

SEQ ID NO: 4508 - protein, 13 aa, synthetic construct [sequence omitted]

SEQ ID NO: 4509 - protein, 13 aa, synthetic construct [sequence omitted]

SEQ ID NO: 4510 - protein, 11 aa, synthetic construct [sequence omitted]

SEQ ID NO: 4511 - protein, 11 aa, synthetic construct [sequence omitted]

SEQ ID NO: 4512 - protein, 10 aa, synthetic construct [sequence omitted]

SEQ ID NO: 4513 - protein, 12 aa, synthetic construct [sequence omitted]

SEQ ID NO: 4514 - protein, 11 aa, synthetic construct [sequence omitted]

SEQ ID NO: 4515 - protein, 11 aa, synthetic construct [sequence omitted]

SEQ ID NO: 4516 - protein, 11 aa, synthetic construct [sequence omitted]

SEQ ID NO: 4517 - protein, 11 aa, synthetic construct [sequence omitted]

SEQ ID NO: 4518 - protein, 11 aa, synthetic construct [sequence omitted]

SEQ ID NO: 4519 - protein, 12 aa, synthetic construct [sequence omitted]

SEQ ID NO: 4520 - protein, 13 aa, synthetic construct [sequence omitted]

SEQ ID NO: 4521 - protein, 13 aa, synthetic construct [sequence omitted]

SEQ ID NO: 4522 - protein, 11 aa, synthetic construct [sequence omitted]

SEQ ID NO: 4523 - protein, 12 aa, synthetic construct
CTSYTSTNSVVF

SEQ ID NO: 4524 - protein, 13 aa, synthetic construct [sequence omitted]

SEQ ID NO: 4525 - protein, 12 aa, synthetic construct [sequence omitted]

SEQ ID NO: 4526 - protein, 11 aa, synthetic construct [sequence omitted]

SEQ ID NO: 4527 - protein, 13 aa, synthetic construct [sequence omitted]

SEQ ID NO: 4528 - protein, 13 aa, synthetic construct [sequence omitted]

SEQ ID NO: 4529 - protein, 11 aa, synthetic construct [sequence omitted]

SEQ ID NO: 4530 - protein, 13 aa, synthetic construct [sequence omitted]

SEQ ID NO: 4531 - protein, 13 aa, synthetic construct [sequence omitted]

SEQ ID NO: 4532 - protein, 13 aa, synthetic construct [sequence omitted]

SEQ ID NO: 4533 - protein, 11 aa, synthetic construct
CAAWDGRLKVF

SEQ ID NO: 4534 - protein, 13 aa, synthetic construct [sequence omitted]

SEQ ID NO: 4535 - protein, 13 aa, synthetic construct [sequence omitted]

SEQ ID NO: 4536 - protein, 13 aa, synthetic construct [sequence omitted]

SEQ ID NO: 4537 - protein, 11 aa, synthetic construct [sequence omitted]

SEQ ID NO: 4538 - protein, 11 aa, synthetic construct
CLHHNTHPLTF

SEQ ID NO: 4539 - protein, 12 aa, synthetic construct [sequence omitted]

SEQ ID NO: 4540 - protein, 11 aa, synthetic construct [sequence omitted]

SEQ ID NO: 4541 - protein, 11 aa, synthetic construct [sequence omitted]

SEQ ID NO: 4542 - protein, 11 aa, synthetic construct [sequence omitted]

SEQ ID NO: 4543 - protein, 13 aa, synthetic construct [sequence omitted]

SEQ ID NO: 4544 - protein, 13 aa, synthetic construct [sequence omitted]

SEQ ID NO: 4545 - protein, 12 aa, synthetic construct [sequence omitted]

SEQ ID NO: 4546 - protein, 11 aa, synthetic construct [sequence omitted]

SEQ ID NO: 4547 - protein, 10 aa, synthetic construct [sequence omitted]

SEQ ID NO: 4548 - protein, 11 aa, synthetic construct [sequence omitted]

SEQ ID NO: 4549 - protein, 11 aa, synthetic construct [sequence omitted]

SEQ ID NO: 4550 - protein, 13 aa, synthetic construct [sequence omitted]

SEQ ID NO: 4551 - protein, 11 aa, synthetic construct [sequence omitted]

SEQ ID NO: 4552 - protein, 13 aa, synthetic construct [sequence omitted]

SEQ ID NO: 4553 - protein, 13 aa, synthetic construct [sequence omitted]

SEQ ID NO: 4554 - protein, 13 aa, synthetic construct [sequence omitted]

SEQ ID NO: 4555 - protein, 11 aa, synthetic construct [sequence omitted]

SEQ ID NO: 4556 - protein, 12 aa, synthetic construct [sequence omitted]

SEQ ID NO: 4557 - protein, 13 aa, synthetic construct [sequence omitted]

SEQ ID NO: 4558 - protein, 11 aa, synthetic construct [sequence omitted]

SEQ ID NO: 4559 - protein, 11 aa, synthetic construct [sequence omitted]

SEQ ID NO: 4560 - protein, 11 aa, synthetic construct [sequence omitted]

SEQ ID NO: 4561 - protein, 12 aa, synthetic construct [sequence omitted]

SEQ ID NO: 4562 - protein, 11 aa, synthetic construct [sequence omitted]

SEQ ID NO: 4563 - protein, 13 aa, synthetic construct [sequence omitted]

SEQ ID NO: 4564 - protein, 13 aa, synthetic construct [sequence omitted]

SEQ ID NO: 4565 - protein, 13 aa, synthetic construct [sequence omitted]

SEQ ID NO: 4566 - protein, 10 aa, synthetic construct [sequence omitted]

SEQ ID NO: 4567 - protein, 13 aa, synthetic construct [sequence omitted]

SEQ ID NO: 4568 - protein, 11 aa, synthetic construct [sequence omitted]

SEQ ID NO: 4569 - protein, 11 aa, synthetic construct [sequence omitted]

SEQ ID NO: 4570 - protein, 11 aa, synthetic construct [sequence omitted]

SEQ ID NO: 4571 - protein, 11 aa, synthetic construct
CQQHNSWPRTF

SEQ ID NO: 4572 - protein, 11 aa, synthetic construct [sequence omitted]

SEQ ID NO: 4573 - protein, 13 aa, synthetic construct [sequence omitted]

SEQ ID NO: 4574 - protein, 11 aa, synthetic construct [sequence omitted]

SEQ ID NO: 4575 - protein, 10 aa, synthetic construct [sequence omitted]

SEQ ID NO: 4576 - protein, 11 aa, synthetic construct [sequence omitted]

SEQ ID NO: 4577 - protein, 12 aa, synthetic construct [sequence omitted]

SEQ ID NO: 4578 - protein, 11 aa, synthetic construct [sequence omitted]

SEQ ID NO: 4579 - protein, 11 aa, synthetic construct [sequence omitted]

SEQ ID NO: 4580 - protein, 11 aa, synthetic construct [sequence omitted]

SEQ ID NO: 4581 - protein, 11 aa, synthetic construct [sequence omitted]

SEQ ID NO: 4582 - protein, 13 aa, synthetic construct [sequence omitted]

SEQ ID NO: 4583 - protein, 13 aa, synthetic construct [sequence omitted]

SEQ ID NO: 4584 - protein, 13 aa, synthetic construct [sequence omitted]

SEQ ID NO: 4585 - protein, 11 aa, synthetic construct [sequence omitted]

SEQ ID NO: 4586 - protein, 11 aa, synthetic construct [sequence omitted]

SEQ ID NO: 4587 - protein, 11 aa, synthetic construct [sequence omitted]

SEQ ID NO: 4588 - protein, 12 aa, synthetic construct [sequence omitted]

SEQ ID NO: 4589 - protein, 10 aa, synthetic construct [sequence omitted]

SEQ ID NO: 4590 - protein, 13 aa, synthetic construct [sequence omitted]

SEQ ID NO: 4591 - protein, 13 aa, synthetic construct [sequence omitted]

SEQ ID NO: 4592 - protein, 13 aa, synthetic construct [sequence omitted]

SEQ ID NO: 4593 - protein, 13 aa, synthetic construct [sequence omitted]

SEQ ID NO: 4594 - protein, 11 aa, synthetic construct [sequence omitted]

SEQ ID NO: 4595 - protein, 13 aa, synthetic construct [sequence omitted]

SEQ ID NO: 4596 - protein, 11 aa, synthetic construct [sequence omitted]

SEQ ID NO: 4597 - protein, 11 aa, synthetic construct [sequence omitted]

SEQ ID NO: 4598 - protein, 12 aa, synthetic construct [sequence omitted]

SEQ ID NO: 4599 - protein, 13 aa, synthetic construct [sequence omitted]

SEQ ID NO: 4600 - protein, 13 aa, synthetic construct
CARLAARLTFDYW

SEQ ID NO: 4601 - protein, 18 aa, synthetic construct
CTKGFPGIVGATRWLDPW

SEQ ID NO: 4602 - protein, 21 aa, synthetic construct
CAKSPPGITGTTYYYYYMDVW

SEQ ID NO: 4603 - protein, 20 aa, synthetic construct
CARGEQQVGNYYYYYYMDVW

SEQ ID NO: 4604 - protein, 17 aa, synthetic construct
CARDPGGYYYSYNMDVW

SEQ ID NO: 4605 - protein, 13 aa, synthetic construct
CARERNWGGFDYW

SEQ ID NO: 4606 - protein, 16 aa, synthetic construct
CAKDRAYYDSSGWDYW

SEQ ID NO: 4607 - protein, 22 aa, synthetic construct
CARERRFLQWLEGYSYYYMDVW

SEQ ID NO: 4608 - protein, 18 aa, synthetic construct
CASLAYCGGDCYSDFDYW

SEQ ID NO: 4609 - protein, 16 aa, synthetic construct
CAKGSTLSTKDWFDPW

SEQ ID NO: 4610 - protein, 16 aa, synthetic construct
CAKGIWFGELFPLDYW

SEQ ID NO: 4611 - protein, 10 aa, synthetic construct [sequence omitted]

SEQ ID NO: 4612 - protein, 16 aa, synthetic construct
CARTGIPGTTMAFDIW

SEQ ID NO: 4613 - protein, 12 aa, synthetic construct [sequence omitted]

SEQ ID NO: 4614 - protein, 13 aa, synthetic construct
CARVYRVGAFDYW

SEQ ID NO: 4615 - protein, 14 aa, synthetic construct
CARDKPGGAGFDPW

SEQ ID NO: 4616 - protein, 16 aa, synthetic construct
CAREGTTLVTDAFDIW

SEQ ID NO: 4617 - protein, 14 aa, synthetic construct
CARDSSWFPYFDYW

SEQ ID NO: 4618 - protein, 14 aa, synthetic construct
CAKPGPRGGQFDYW

SEQ ID NO: 4619 - protein, 15 aa, synthetic construct
CARGATGDGAGFDYW

SEQ ID NO: 4620 - protein, 16 aa, synthetic construct
CARDGFWNGYDWFDPW

SEQ ID NO: 4621 - protein, 17 aa, synthetic construct
CARDPGGYYYSYNMDVW

SEQ ID NO: 4622 - protein, 16 aa, synthetic construct
CAREGTTLVTDAFDIW

SEQ ID NO: 4623 - protein, 18 aa, synthetic construct
CARGGAARPYYYYYMDVW

SEQ ID NO: 4624 - protein, 19 aa, synthetic construct
CARGGAARPYYYYYYMDVW

SEQ ID NO: 4625 - protein, 19 aa, synthetic construct
CARERVGATDYYYYYMDVW

SEQ ID NO: 4626 - protein, 19 aa, synthetic construct
CARDGWELLGYYHYYMDVW

SEQ ID NO: 4627 - protein, 15 aa, synthetic construct
CASRIAAAALLFDYW

SEQ ID NO: 4628 - protein, 17 aa, synthetic construct
CARACSSTSCYGAFDIW

SEQ ID NO: 4629 - protein, 16 aa, synthetic construct
CARQMYNWNDGGFDPW

SEQ ID NO: 4630 - protein, 23 aa, synthetic construct
CARDGFRYYYDSGGYYSNWFDPW

SEQ ID NO: 4631 - protein, 11 aa, synthetic construct [sequence omitted]

SEQ ID NO: 4632 - protein, 13 aa, synthetic construct
CQSYDTSLNRYVF

SEQ ID NO: 4633 - protein, 12 aa, synthetic construct [sequence omitted]

SEQ ID NO: 4634 - protein, 13 aa, synthetic construct [sequence omitted]

SEQ ID NO: 4635 - protein, 13 aa, synthetic construct
CYSTFSSDNYRVF

SEQ ID NO: 4636 - protein, 14 aa, synthetic construct [sequence omitted]

SEQ ID NO: 4637 - protein, 13 aa, synthetic construct [sequence omitted]

SEQ ID NO: 4638 - protein, 10 aa, synthetic construct [sequence omitted]

SEQ ID NO: 4639 - protein, 12 aa, synthetic construct [sequence omitted]

SEQ ID NO: 4640 - protein, 11 aa, synthetic construct [sequence omitted]

SEQ ID NO: 4641 - protein, 11 aa, synthetic construct [sequence omitted]

SEQ ID NO: 4642 - protein, 12 aa, synthetic construct [sequence omitted]

SEQ ID NO: 4643 - protein, 11 aa, synthetic construct [sequence omitted]

SEQ ID NO: 4644 - protein, 11 aa, synthetic construct
CQQSSRSPYTF

SEQ ID NO: 4645 - protein, 11 aa, synthetic construct [sequence omitted]

SEQ ID NO: 4646 - protein, 12 aa, synthetic construct
CQVWDSSSDVVF

SEQ ID NO: 4647 - protein, 13 aa, synthetic construct [sequence omitted]

SEQ ID NO: 4648 - protein, 11 aa, synthetic construct [sequence omitted]

SEQ ID NO: 4649 - protein, 11 aa, synthetic construct
CHQYNSYPFTF

SEQ ID NO: 4650 - protein, 11 aa, synthetic construct [sequence omitted]

SEQ ID NO: 4651 - protein, 11 aa, synthetic construct [sequence omitted]

SEQ ID NO: 4652 - protein, 11 aa, synthetic construct
CQQYVTHLRTF

SEQ ID NO: 4653 - protein, 12 aa, synthetic construct [sequence omitted]

SEQ ID NO: 4654 - protein, 12 aa, synthetic construct [sequence omitted]

SEQ ID NO: 4655 - protein, 11 aa, synthetic construct [sequence omitted]

SEQ ID NO: 4656 - protein, 12 aa, synthetic construct
CNSRDSSGNRMF

SEQ ID NO: 4657 - protein, 11 aa, synthetic construct [sequence omitted]

SEQ ID NO: 4658 - protein, 10 aa, synthetic construct [sequence omitted]

SEQ ID NO: 4659 - protein, 13 aa, synthetic construct [sequence omitted]

SEQ ID NO: 4660 - protein, 11 aa, synthetic construct [sequence omitted]

SEQ ID NO: 4661 - protein, 12 aa, synthetic construct [sequence omitted]

SEQ ID NO: 4662 - protein, 13 aa, synthetic construct [sequence omitted]

SEQ ID NO: 4663 - protein, 13 aa, synthetic construct [sequence omitted]

SEQ ID NO: 4664 - protein, 13 aa, synthetic construct [sequence omitted]

SEQ ID NO: 4665 - protein, 13 aa, synthetic construct [sequence omitted]

SEQ ID NO: 4666 - protein, 13 aa, synthetic construct [sequence omitted]

SEQ ID NO: 4667 - protein, 13 aa, synthetic construct [sequence omitted]

SEQ ID NO: 4668 - protein, 5 aa, synthetic construct
GNYIH

SEQ ID NO: 4669 - protein, 5 aa, synthetic construct
DNYIH

SEQ ID NO: 4670 - protein, 5 aa, synthetic construct
NYYMH

SEQ ID NO: 4671 - protein, 5 aa, synthetic construct
NHFMH

SEQ ID NO: 4672 - protein, 5 aa, synthetic construct
GYYIH

SEQ ID NO: 4673 - protein, 5 aa, synthetic construct
GYYMH

SEQ ID NO: 4674 - protein, 5 aa, synthetic construct
GYYMH

SEQ ID NO: 4675 - protein, 5 aa, synthetic construct
GYYIH

SEQ ID NO: 4676 - protein, 5 aa, synthetic construct
DYYMH

SEQ ID NO: 4677 - protein, 5 aa, synthetic construct
NYYIH

SEQ ID NO: 4678 - protein, 5 aa, synthetic construct
GYDMH

SEQ ID NO: 4679 - protein, 5 aa, synthetic construct
GNYIH

SEQ ID NO: 4680 - protein, 5 aa, synthetic construct
GYYMH

SEQ ID NO: 4681 - protein, 5 aa, synthetic construct
GYYIH

SEQ ID NO: 4682 - protein, 5 aa, synthetic construct
DYGMS

SEQ ID NO: 4683 - protein, 5 aa, synthetic construct
SYSMN

SEQ ID NO: 4684 - protein, 5 aa, synthetic construct
NYGIS

SEQ ID NO: 4685 - protein, 5 aa, synthetic construct
DYGMS

SEQ ID NO: 4686 - protein, 5 aa, synthetic construct
SYYMH

SEQ ID NO: 4687 - protein, 5 aa, synthetic construct
SYYMH

SEQ ID NO: 4688 - protein, 5 aa, synthetic construct
SYYMH

SEQ ID NO: 4689 - protein, 7 aa, synthetic construct
STNYYWG

SEQ ID NO: 4690 - protein, 7 aa, synthetic construct
SNSATWN

SEQ ID NO: 4691 - protein, 7 aa, synthetic construct
SHSGAWN

SEQ ID NO: 4692 - protein, 5 aa, synthetic construct
NAWMS

SEQ ID NO: 4693 - protein, 7 aa, synthetic construct
SNIAAWN

SEQ ID NO: 4694 - protein, 7 aa, synthetic construct
SNSTAWN

SEQ ID NO: 4695 - protein, 5 aa, synthetic construct
SYAMT

SEQ ID NO: 4696 - protein, 5 aa, synthetic construct
NYAMT

SEQ ID NO: 4697 - protein, 5 aa, synthetic construct
GYDVN

SEQ ID NO: 4698 - protein, 5 aa, synthetic construct
GYYMH

SEQ ID NO: 4699 - protein, 5 aa, synthetic construct
DYYMS

SEQ ID NO: 4700 - protein, 6 aa, synthetic construct
SNNWWS

SEQ ID NO: 4701 - protein, 5 aa, synthetic construct
SYAMN

SEQ ID NO: 4702 - protein, 5 aa, synthetic construct
RYAVN

SEQ ID NO: 4703 - protein, 5 aa, synthetic construct
NYAMN

SEQ ID NO: 4704 - protein, 5 aa, synthetic construct
NYAMN

SEQ ID NO: 4705 - protein, 5 aa, synthetic construct
NYGIS

SEQ ID NO: 4706 - protein, 5 aa, synthetic construct
SYSMN

SEQ ID NO: 4707 - protein, 5 aa, synthetic construct
GYYMN

SEQ ID NO: 4708 - protein, 5 aa, synthetic construct
GYYMH

SEQ ID NO: 4709 - protein, 5 aa, synthetic construct
GYYMH

SEQ ID NO: 4710 - protein, 5 aa, synthetic construct
GYYLH

SEQ ID NO: 4711 - protein, 5 aa, synthetic construct
GSYIH

SEQ ID NO: 4712 - protein, 6 aa, synthetic construct
STNWWS

SEQ ID NO: 4713 - protein, 5 aa, synthetic construct
GNYIH

SEQ ID NO: 4714 - protein, 5 aa, synthetic construct
WYWMH

SEQ ID NO: 4715 - protein, 5 aa, synthetic construct
WHWMH

SEQ ID NO: 4716 - protein, 5 aa, synthetic construct
WFWLH

SEQ ID NO: 4717 - protein, 5 aa, synthetic construct
YYWLH

SEQ ID NO: 4718 - protein, 5 aa, synthetic construct
WYWMH

SEQ ID NO: 4719 - protein, 5 aa, synthetic construct
NYTMN

SEQ ID NO: 4720 - protein, 5 aa, synthetic construct
RYRMN

SEQ ID NO: 4721 - protein, 5 aa, synthetic construct
DYYVY

SEQ ID NO: 4722 - protein, 5 aa, synthetic construct
DYYIH

SEQ ID NO: 4723 - protein, 6 aa, synthetic construct
SNNWWS

SEQ ID NO: 4724 - protein, 6 aa, synthetic construct
SSNWWS

SEQ ID NO: 4725 - protein, 5 aa, synthetic construct
YSTMT

SEQ ID NO: 4726 - protein, 6 aa, synthetic construct
SSNWWS

SEQ ID NO: 4727 - protein, 5 aa, synthetic construct
NYGIS

SEQ ID NO: 4728 - protein, 6 aa, synthetic construct
SSDLWS

SEQ ID NO: 4729 - protein, 6 aa, synthetic construct
SNNWWS

SEQ ID NO: 4730 - protein, 6 aa, synthetic construct
SSNWWS

SEQ ID NO: 4731 - protein, 6 aa, synthetic construct
SSDWWS

SEQ ID NO: 4732 - protein, 6 aa, synthetic construct
SSNWWS

SEQ ID NO: 4733 - protein, 6 aa, synthetic construct
SSNWWT

SEQ ID NO: 4734 - protein, 6 aa, synthetic construct
SSNWWS

SEQ ID NO: 4735 - protein, 7 aa, synthetic construct
SNSAAWN

SEQ ID NO: 4736 - protein, 7 aa, synthetic construct
TNSAAWN

SEQ ID NO: 4737 - protein, 7 aa, synthetic construct
SNSAAWN

SEQ ID NO: 4738 - protein, 7 aa, synthetic construct
TNGASWN

SEQ ID NO: 4739 - protein, 7 aa, synthetic construct
TNSASWN

SEQ ID NO: 4740 - protein, 5 aa, synthetic construct
TSLMN

SEQ ID NO: 4741 - protein, 7 aa, synthetic construct
RNSVAWN

SEQ ID NO: 4742 - protein, 7 aa, synthetic construct
RNSSAWN

SEQ ID NO: 4743 - protein, 7 aa, synthetic construct
SNSAAWN

SEQ ID NO: 4744 - protein, 7 aa, synthetic construct
SISASWN

SEQ ID NO: 4745 - protein, 7 aa, synthetic construct
SNSAAWN

SEQ ID NO: 4746 - protein, 7 aa, synthetic construct
SKSASWN

SEQ ID NO: 4747 - protein, 7 aa, synthetic construct
NNSAAWN

SEQ ID NO: 4748 - protein, 7 aa, synthetic construct
SNGATWN

SEQ ID NO: 4749 - protein, 7 aa, synthetic construct
SNSATWN

SEQ ID NO: 4750 - protein, 7 aa, synthetic construct
NNSASWN

SEQ ID NO: 4751 - protein, 5 aa, synthetic construct
GYYMH

SEQ ID NO: 4752 - protein, 5 aa, synthetic construct
GNYMH

SEQ ID NO: 4753 - protein, 7 aa, synthetic construct
HNSASWN

SEQ ID NO: 4754 - protein, 5 aa, synthetic construct
GYYMH

SEQ ID NO: 4755 - protein, 5 aa, synthetic construct
TYSMN

SEQ ID NO: 4756 - protein, 5 aa, synthetic construct
GYYMH

SEQ ID NO: 4757 - protein, 5 aa, synthetic construct
GYYMH

SEQ ID NO: 4758 - protein, 5 aa, synthetic construct
GNYIH

SEQ ID NO: 4759 - protein, 5 aa, synthetic construct
GYDMH

SEQ ID NO: 4760 - protein, 7 aa, synthetic construct
SNSAAWN

SEQ ID NO: 4761 - protein, 6 aa, synthetic construct
SSNWWN

SEQ ID NO: 4762 - protein, 5 aa, synthetic construct
NYYIH

SEQ ID NO: 4763 - protein, 7 aa, synthetic construct
NNGASWN

SEQ ID NO: 4764 - protein, 7 aa, synthetic construct
SNSAAWN

SEQ ID NO: 4765 - protein, 5 aa, synthetic construct
GYYWS

SEQ ID NO: 4766 - protein, 6 aa, synthetic construct
SSNWWN

SEQ ID NO: 4767 - protein, 6 aa, synthetic construct
SSNWWN

SEQ ID NO: 4768 - protein, 6 aa, synthetic construct
SSNWWN

SEQ ID NO: 4769 - protein, 5 aa, synthetic construct
TYSMN

SEQ ID NO: 4770 - protein, 5 aa, synthetic construct
GYYMH

SEQ ID NO: 4771 - protein, 5 aa, synthetic construct
GYYIH

SEQ ID NO: 4772 - protein, 7 aa, synthetic construct
NNSAAWN

SEQ ID NO: 4773 - protein, 5 aa, synthetic construct
NYGIS

SEQ ID NO: 4774 - protein, 7 aa, synthetic construct
SNSASWN

SEQ ID NO: 4775 - protein, 5 aa, synthetic construct
GHYIH

SEQ ID NO: 4776 - protein, 7 aa, synthetic construct
SSYYYWG

SEQ ID NO: 4777 - protein, 7 aa, synthetic construct
SSYYYWG

SEQ ID NO: 4778 - protein, 7 aa, synthetic construct
SSNYYWG

SEQ ID NO: 4779 - protein, 7 aa, synthetic construct
SSSYYWG

SEQ ID NO: 4780 - protein, 5 aa, synthetic construct
SYVVS

SEQ ID NO: 4781 - protein, 5 aa, synthetic construct
GHDMH

SEQ ID NO: 4782 - protein, 5 aa, synthetic construct
NYAMH

SEQ ID NO: 4783 - protein, 7 aa, synthetic construct
SSSYYGG

SEQ ID NO: 4784 - protein, 7 aa, synthetic construct
SGGYYWS

SEQ ID NO: 4785 - protein, 7 aa, synthetic construct
SGVYYWS

SEQ ID NO: 4786 - protein, 7 aa, synthetic construct
SGDYYWS

SEQ ID NO: 4787 - protein, 7 aa, synthetic construct
SGDYYWS

SEQ ID NO: 4788 - protein, 7 aa, synthetic construct
SGDYYWS

SEQ ID NO: 4789 - protein, 7 aa, synthetic construct
SGDYYWS

SEQ ID NO: 4790 - protein, 7 aa, synthetic construct
SGDYYWS

SEQ ID NO: 4791 - protein, 7 aa, synthetic construct
SGDYYWS

SEQ ID NO: 4792 - protein, 7 aa, synthetic construct
SNGYYWT

SEQ ID NO: 4793 - protein, 7 aa, synthetic construct
SGVYYWS

SEQ ID NO: 4794 - protein, 7 aa, synthetic construct
SGVYYWS

SEQ ID NO: 4795 - protein, 7 aa, synthetic construct
SGVYYWS

SEQ ID NO: 4796 - protein, 7 aa, synthetic construct
RTNYYWA

SEQ ID NO: 4797 - protein, 5 aa, synthetic construct
TYSMN

SEQ ID NO: 4798 - protein, 5 aa, synthetic construct
GYYWS

SEQ ID NO: 4799 - protein, 5 aa, synthetic construct
SYWIG

SEQ ID NO: 4800 - protein, 5 aa, synthetic construct
SFGFS

SEQ ID NO: 4801 - protein, 7 aa, synthetic construct
SSTFYWG

SEQ ID NO: 4802 - protein, 7 aa, synthetic construct
TSGEGVG

SEQ ID NO: 4803 - protein, 7 aa, synthetic construct
TSGEGVG

SEQ ID NO: 4804 - protein, 7 aa, synthetic construct
STGFFWG

SEQ ID NO: 4805 - protein, 5 aa, synthetic construct
SYGIS

SEQ ID NO: 4806 - protein, 5 aa, synthetic construct
SYGIS

SEQ ID NO: 4807 - protein, 5 aa, synthetic construct
NYGVS

SEQ ID NO: 4808 - protein, 5 aa, synthetic construct
NYGVS

SEQ ID NO: 4809 - protein, 5 aa, synthetic construct
NYGIS

SEQ ID NO: 4810 - protein, 5 aa, synthetic construct
SYGIT

SEQ ID NO: 4811 - protein, 5 aa, synthetic construct
NYGIS

SEQ ID NO: 4812 - protein, 5 aa, synthetic construct
SFGIN

SEQ ID NO: 4813 - protein, 6 aa, synthetic construct
NSNWWT

SEQ ID NO: 4814 - protein, 5 aa, synthetic construct
GYYIH

SEQ ID NO: 4815 - protein, 5 aa, synthetic construct
NLGIS

SEQ ID NO: 4816 - protein, 5 aa, synthetic construct
NYGIS

SEQ ID NO: 4817 - protein, 5 aa, synthetic construct
NYGIS

SEQ ID NO: 4818 - protein, 5 aa, synthetic construct
SYNMH

SEQ ID NO: 4819 - protein, 5 aa, synthetic construct
TYGIS

SEQ ID NO: 4820 - protein, 7 aa, synthetic construct
SNSAAWN

SEQ ID NO: 4821 - protein, 6 aa, synthetic construct
SNNWWS

SEQ ID NO: 4822 - protein, 6 aa, synthetic construct
GSDWWS

SEQ ID NO: 4823 - protein, 6 aa, synthetic construct
SSNWWS

SEQ ID NO: 4824 - protein, 6 aa, synthetic construct
SSNWWS

SEQ ID NO: 4825 - protein, 6 aa, synthetic construct
STNWWN

SEQ ID NO: 4826 - protein, 17 aa, synthetic construct
WINPYSDATHYAQKFQG

SEQ ID NO: 4827 - protein, 17 aa, synthetic construct
WINPYSGATHYAQNFQD

SEQ ID NO: 4828 - protein, 17 aa, synthetic construct
WIIPNSGGTKFAQKFQG

SEQ ID NO: 4829 - protein, 17 aa, synthetic construct
IINPSGGSTNYAQKFQG

SEQ ID NO: 4830 - protein, 17 aa, synthetic construct
WIIPNSGGTKYAQKFQG

SEQ ID NO: 4831 - protein, 17 aa, synthetic construct
WINPHSGGTNYAQKFQG

SEQ ID NO: 4832 - protein, 17 aa, synthetic construct
WINPHSGGTNYAQKFQG

SEQ ID NO: 4833 - protein, 17 aa, synthetic construct
WIIPNSGGTKYAQNFQG

SEQ ID NO: 4834 - protein, 17 aa, synthetic construct
WIIPNSGGTKYAQNFQG

SEQ ID NO: 4835 - protein, 17 aa, synthetic construct
WIIPNSGGTKYAQKFQG

SEQ ID NO: 4836 - protein, 17 aa, synthetic construct
VIWYDGSNKYYADSVKG

SEQ ID NO: 4837 - protein, 17 aa, synthetic construct
WIHPYSGGTKYAQKFQG

SEQ ID NO: 4838 - protein, 17 aa, synthetic construct
WIIPNSGGTKYAQKFQG

SEQ ID NO: 4839 - protein, 17 aa, synthetic construct
WIIPNSGGTKYAQKFQG

SEQ ID NO: 4840 - protein, 17 aa, synthetic construct
GINWNGDSKGYVDSVKG

SEQ ID NO: 4841 - protein, 17 aa, synthetic construct
VISGSGGGTFYADSVKG

SEQ ID NO: 4842 - protein, 17 aa, synthetic construct
WISAYNGNTNYAQKLQG

SEQ ID NO: 4843 - protein, 17 aa, synthetic construct
GINWNGDSTGYVDSVKG

SEQ ID NO: 4844 - protein, 17 aa, synthetic construct
VISPTGGGTHYAQKFQG

SEQ ID NO: 4845 - protein, 17 aa, synthetic construct
VISPTGGGTHYAQKFQG

SEQ ID NO: 4846 - protein, 17 aa, synthetic construct
VISPTGGGTHYAQKFQG

SEQ ID NO: 4847 - protein, 16 aa, synthetic construct
SIYYSGITYYNPSLKS

SEQ ID NO: 4848 - protein, 18 aa, synthetic construct
RTYYRSKWYNDYAVSVKS

SEQ ID NO: 4849 - protein, 18 aa, synthetic construct
RTYYRSKWYNDYAVSVKS

SEQ ID NO: 4850 - protein, 19 aa, synthetic construct
RIKSKTDGGTTDYAAPVKG

SEQ ID NO: 4851 - protein, 18 aa, synthetic construct
RTYYRSKWYNEYAVSVKG

SEQ ID NO: 4852 - protein, 18 aa, synthetic construct
RTYYWSKWYNEYAVSVKG

SEQ ID NO: 4853 - protein, 17 aa, synthetic construct
AISGSGGQTFSADSVKG

SEQ ID NO: 4854 - protein, 17 aa, synthetic construct
AITGSGGNTFSADSVKG

SEQ ID NO: 4855 - protein, 17 aa, synthetic construct
GISSSGESTYYADSVKG

SEQ ID NO: 4856 - protein, 17 aa, synthetic construct
WINPNSGGTNYAQKFQG

SEQ ID NO: 4857 - protein, 17 aa, synthetic construct
YISGPGSTIYYADSVKG

SEQ ID NO: 4858 - protein, 16 aa, synthetic construct
EIYHNGTTSYNPSLES

SEQ ID NO: 4859 - protein, 17 aa, synthetic construct
WINTNTGNPTYAQGFTG

SEQ ID NO: 4860 - protein, 17 aa, synthetic construct
GIIPIFGTVNYAQKFQG

SEQ ID NO: 4861 - protein, 17 aa, synthetic construct
AILGSGGNTYYADSVKG

SEQ ID NO: 4862 - protein, 17 aa, synthetic construct
WINTNTGNPTYAQGFTG

SEQ ID NO: 4863 - protein, 17 aa, synthetic construct
WISAYNGNTNYAQKLQG

SEQ ID NO: 4864 - protein, 17 aa, synthetic construct
YISSSSSTIYYADSVKG

SEQ ID NO: 4865 - protein, 17 aa, synthetic construct
LISPNSGDTYYSHKFQG

SEQ ID NO: 4866 - protein, 17 aa, synthetic construct
WINPNSGDTNYEQKFQG

SEQ ID NO: 4867 - protein, 17 aa, synthetic construct
WINPNSGDTNYEQKFQG

SEQ ID NO: 4868 - protein, 17 aa, synthetic construct
WIDPNSGGTNSAQIFQG

SEQ ID NO: 4869 - protein, 17 aa, synthetic construct
WINPNSGATNYAQRFQG

SEQ ID NO: 4870 - protein, 16 aa, synthetic construct
AIYQTGNTYYNPSLKS

SEQ ID NO: 4871 - protein, 17 aa, synthetic construct
WINPNSGHTNYAQNFQG

SEQ ID NO: 4872 - protein, 17 aa, synthetic construct
RIKSDGSNTRYADSVKG

SEQ ID NO: 4873 - protein, 17 aa, synthetic construct
RIKSDGSNTKYADSVKG

SEQ ID NO: 4874 - protein, 17 aa, synthetic construct
RIKSDGSSTKYADSVKG

SEQ ID NO: 4875 - protein, 17 aa, synthetic construct
RINSDGSNTKYADSVKG

SEQ ID NO: 4876 - protein, 17 aa, synthetic construct
RIKSDGGSPKYADSVKG

SEQ ID NO: 4877 - protein, 17 aa, synthetic construct
SISSSGTYIYYADSVKG

SEQ ID NO: 4878 - protein, 17 aa, synthetic construct
SISSSTSYIFYADSVKG

SEQ ID NO: 4879 - protein, 17 aa, synthetic construct
WINPDSGGTNYEQKFQG

SEQ ID NO: 4880 - protein, 17 aa, synthetic construct
WINPNSGGTHYAQKFQG

SEQ ID NO: 4881 - protein, 16 aa, synthetic construct
EIYHSGSTSYNPSLKS

SEQ ID NO: 4882 - protein, 16 aa, synthetic construct
EIYHSGSTSYNPSLKS

SEQ ID NO: 4883 - protein, 17 aa, synthetic construct
SIGGIGGYTYYADSVKG

SEQ ID NO: 4884 - protein, 16 aa, synthetic construct
EIYHSGSTSYNPSLKS

SEQ ID NO: 4885 - protein, 17 aa, synthetic construct
WISAYNGNTKYAQKLQG

SEQ ID NO: 4886 - protein, 16 aa, synthetic construct
EIYHSGTTNSNPSLKS

SEQ ID NO: 4887 - protein, 16 aa, synthetic construct
EIYHTGSTNYNPSLKS

SEQ ID NO: 4888 - protein, 16 aa, synthetic construct
EIYHSGSTNYNPSLKS

SEQ ID NO: 4889 - protein, 16 aa, synthetic construct
EVYHSGSTNYNPSLRS

SEQ ID NO: 4890 - protein, 16 aa, synthetic construct
EIYHSGSTNYNPSLKS

SEQ ID NO: 4891 - protein, 16 aa, synthetic construct
EIYHSGSSNYNPSLKS

SEQ ID NO: 4892 - protein, 16 aa, synthetic construct
EIYHSGSTNYNPSLKS

SEQ ID NO: 4893 - protein, 18 aa, synthetic construct
RTYFRSEWYTDYAVSVKS

SEQ ID NO: 4894 - protein, 18 aa, synthetic construct
RTYYRSRWYNDYAVSVKS

SEQ ID NO: 4895 - protein, 18 aa, synthetic construct
RTYYRSKWYNDYGVSVTG

SEQ ID NO: 4896 - protein, 18 aa, synthetic construct
RTYYRSDWYNDYTGSVIG

SEQ ID NO: 4897 - protein, 18 aa, synthetic construct
RTYYRSNWYTDYAVSVIS

SEQ ID NO: 4898 - protein, 17 aa, synthetic construct
SITSGGTYISYTDSVKG

SEQ ID NO: 4899 - protein, 18 aa, synthetic construct
RTDYRSMWSGDYVESVQG

SEQ ID NO: 4900 - protein, 18 aa, synthetic construct
RTYYWSKWYYEYAISVKG

SEQ ID NO: 4901 - protein, 18 aa, synthetic construct
RTYYRSNWFGDNAASVQG

SEQ ID NO: 4902 - protein, 18 aa, synthetic construct
RTYYRSKWYNDYGVSVKS

SEQ ID NO: 4903 - protein, 18 aa, synthetic construct
RTYYRSNWYGDYAVSVQG

SEQ ID NO: 4904 - protein, 18 aa, synthetic construct
RTYYRSEWYNDYALSVIS

SEQ ID NO: 4905 - protein, 18 aa, synthetic construct
RTYYRSEWFNDYGASVIG

SEQ ID NO: 4906 - protein, 18 aa, synthetic construct
RTYYRSQWYNDYGVSVLS

SEQ ID NO: 4907 - protein, 18 aa, synthetic construct
RTYYRSKWYNDYSVSVTS

SEQ ID NO: 4908 - protein, 18 aa, synthetic construct
RTFYRSNWYNDYSVSVIS

SEQ ID NO: 4909 - protein, 17 aa, synthetic construct
WINPNSGGTNYAQKFQG

SEQ ID NO: 4910 - protein, 17 aa, synthetic construct
WINPNSGGTNYVQKFQG

SEQ ID NO: 4911 - protein, 18 aa, synthetic construct
RTYYRSSWYNDYAVSVIS

SEQ ID NO: 4912 - protein, 17 aa, synthetic construct
WINPKSDGTNYAQKFQG

SEQ ID NO: 4913 - protein, 17 aa, synthetic construct
YISSSSSTIYYADSVKG

SEQ ID NO: 4914 - protein, 17 aa, synthetic construct
WINPTSGATNYAQKFQG

SEQ ID NO: 4915 - protein, 17 aa, synthetic construct
WINPTSGATNYAQKFQG

SEQ ID NO: 4916 - protein, 17 aa, synthetic construct
WINPNSGVTYSAQKLQG

SEQ ID NO: 4917 - protein, 17 aa, synthetic construct
VIWYDGSNKYYADSVKG

SEQ ID NO: 4918 - protein, 18 aa, synthetic construct
RTYYRSRWYNDYAVSVKS

SEQ ID NO: 4919 - protein, 16 aa, synthetic construct
EIYHSGSTSYNPSLKS

SEQ ID NO: 4920 - protein, 17 aa, synthetic construct
WINSNSGVTNYAQKFQD

SEQ ID NO: 4921 - protein, 18 aa, synthetic construct
RTYYRSGWYNDYAVSVIS

SEQ ID NO: 4922 - protein, 18 aa, synthetic construct
RTYYRSDWYNDYGISVTS

SEQ ID NO: 4923 - protein, 16 aa, synthetic construct
DINHSGSINYNPSLKS

SEQ ID NO: 4924 - protein, 16 aa, synthetic construct
EIYHSGSTNYNPSLKS

SEQ ID NO: 4925 - protein, 16 aa, synthetic construct
EIYHSGSTNYNPSLKS

SEQ ID NO: 4926 - protein, 16 aa, synthetic construct
EIYHSGSTNYNPSLKS

SEQ ID NO: 4927 - protein, 17 aa, synthetic construct
SISSSGFYIYYADSVKG

SEQ ID NO: 4928 - protein, 17 aa, synthetic construct
WINPNSGVTNYSQKFQG

SEQ ID NO: 4929 - protein, 17 aa, synthetic construct
WINPISGDTHFAQKFQG

SEQ ID NO: 4930 - protein, 15 aa, synthetic construct
RTYYRSKWYNDYAKS

SEQ ID NO: 4931 - protein, 17 aa, synthetic construct
WIRTYNGNTNYAQRFQG

SEQ ID NO: 4932 - protein, 18 aa, synthetic construct
RTYYRSNYYNDYAVSVPS

SEQ ID NO: 4933 - protein, 17 aa, synthetic construct
WSNPYSGATHYAEKFQG

SEQ ID NO: 4934 - protein, 16 aa, synthetic construct
SFYYNGFTYYNPSLKS

SEQ ID NO: 4935 - protein, 16 aa, synthetic construct
SFYYNGFTYYNPSLKS

SEQ ID NO: 4936 - protein, 16 aa, synthetic construct
NIYFRGNTYYNPSLKS

SEQ ID NO: 4937 - protein, 16 aa, synthetic construct
NIFYSGNTYYNPSLKS

SEQ ID NO: 4938 - protein, 17 aa, synthetic construct
WITPYNGNTNYAQNLQD

SEQ ID NO: 4939 - protein, 17 aa, synthetic construct
VIWYDGSNKYYGDSVKG

SEQ ID NO: 4940 - protein, 17 aa, synthetic construct
VIWYDGSNKYYADSVKG

SEQ ID NO: 4941 - protein, 16 aa, synthetic construct
SIYYSGSTYYNPSLKS

SEQ ID NO: 4942 - protein, 16 aa, synthetic construct
YIHHRGTTYFNPSLKS

SEQ ID NO: 4943 - protein, 16 aa, synthetic construct
YISNSETTYYNPSLKS

SEQ ID NO: 4944 - protein, 16 aa, synthetic construct
YIYYRGTTYYNPSLKS

SEQ ID NO: 4945 - protein, 16 aa, synthetic construct
YIYYRGTTYYNPSLKS

SEQ ID NO: 4946 - protein, 16 aa, synthetic construct
YISYIGTTYYNPSLKS

SEQ ID NO: 4947 - protein, 16 aa, synthetic construct
YIYYRGTTFYNPSLKS

SEQ ID NO: 4948 - protein, 16 aa, synthetic construct
YIYYRGTTYYNPSLKS

SEQ ID NO: 4949 - protein, 16 aa, synthetic construct
YIYYRGTTYYNPSLKS

SEQ ID NO: 4950 - protein, 16 aa, synthetic construct
YMSYIGTTYSNPSLKS

SEQ ID NO: 4951 - protein, 16 aa, synthetic construct
YISYSGTTYYNPSLKS

SEQ ID NO: 4952 - protein, 16 aa, synthetic construct
YISNSGTTYYNPSLKS

SEQ ID NO: 4953 - protein, 16 aa, synthetic construct
YISNSGTTYYNPSLKS

SEQ ID NO: 4954 - protein, 16 aa, synthetic construct
NIYYSGDTYYNPSLKS

SEQ ID NO: 4955 - protein, 17 aa, synthetic construct
SIGGSSSYTYYADSVKG

SEQ ID NO: 4956 - protein, 16 aa, synthetic construct
EINHYGSTNYNPSLKS

SEQ ID NO: 4957 - protein, 17 aa, synthetic construct
IIYPGDSATRYSPSFQG

SEQ ID NO: 4958 - protein, 17 aa, synthetic construct
WTSGYNGITKYSQMFQD

SEQ ID NO: 4959 - protein, 16 aa, synthetic construct
SIYYSGNTYYNPSLKS

SEQ ID NO: 4960 - protein, 16 aa, synthetic construct
LIYWNDDKRYSPSLKN

SEQ ID NO: 4961 - protein, 16 aa, synthetic construct
LIYWNDDKRYNPSLEN

SEQ ID NO: 4962 - protein, 16 aa, synthetic construct
SIYYSGNTYYNPSLKS

SEQ ID NO: 4963 - protein, 17 aa, synthetic construct
WISAYDGDTNYAQKFQG

SEQ ID NO: 4964 - protein, 17 aa, synthetic construct
WTSGYNGITKYAQKFQD

SEQ ID NO: 4965 - protein, 17 aa, synthetic construct
WIGANNAYTKYAQKLQG

SEQ ID NO: 4966 - protein, 17 aa, synthetic construct
WISAYNGDTNYAQKFQG

SEQ ID NO: 4967 - protein, 17 aa, synthetic construct
WISAYNGNTNYAQKFQG

SEQ ID NO: 4968 - protein, 17 aa, synthetic construct
WISVYNGDTNYAQNLQG

SEQ ID NO: 4969 - protein, 17 aa, synthetic construct
WISAYNGDTNYAQKIQG

SEQ ID NO: 4970 - protein, 17 aa, synthetic construct
WTSGYNGITKYVEKFQD

SEQ ID NO: 4971 - protein, 16 aa, synthetic construct
EIYHSVNTNYNPSLKS

SEQ ID NO: 4972 - protein, 17 aa, synthetic construct
WINPYSGATNYAQKFQG

SEQ ID NO: 4973 - protein, 17 aa, synthetic construct
WISPYNGFTNYAQKLQG

SEQ ID NO: 4974 - protein, 17 aa, synthetic construct
WISAYNGNTNYAQKFQG

SEQ ID NO: 4975 - protein, 17 aa, synthetic construct
WISVYNGYTKYSQKLQG

SEQ ID NO: 4976 - protein, 17 aa, synthetic construct
IIHPSGGSTNYAQKFQG

SEQ ID NO: 4977 - protein, 17 aa, synthetic construct
WISAYYGNTNYAQKLQG

SEQ ID NO: 4978 - protein, 18 aa, synthetic construct
RTYYMSKWFTEYAVSVKR

SEQ ID NO: 4979 - protein, 16 aa, synthetic construct
EIYHGGSTNYNPSLKS

SEQ ID NO: 4980 - protein, 16 aa, synthetic construct
EIFHSGSTNYNPSLKS

SEQ ID NO: 4981 - protein, 16 aa, synthetic construct
EIYHGGSTSYNPSLKS

SEQ ID NO: 4982 - protein, 16 aa, synthetic construct
EIYHSGSTNYNPSLRS

SEQ ID NO: 4983 - protein, 16 aa, synthetic construct
EIYHSGTTNHNPSLKS

SEQ ID NO: 4984 - protein, 9 aa, synthetic construct
AARPDWFDP

SEQ ID NO: 4985 - protein, 9 aa, synthetic construct
AARPDWFDP

SEQ ID NO: 4986 - protein, 10 aa, synthetic construct
AAYSSSWYDY

SEQ ID NO: 4987 - protein, 9 aa, synthetic construct
ADGYEAFDI

SEQ ID NO: 4988 - protein, 10 aa, synthetic construct
AGFSSSWYDY

SEQ ID NO: 4989 - protein, 16 aa, synthetic construct
AGICSGTTCYGYGSDY

SEQ ID NO: 4990 - protein, 16 aa, synthetic construct
AGICSGTTCYGYGSDY

SEQ ID NO: 4991 - protein, 10 aa, synthetic construct
AGYSSAWYDY

SEQ ID NO: 4992 - protein, 10 aa, synthetic construct
AGYSSSWYDN

SEQ ID NO: 4993 - protein, 10 aa, synthetic construct
AGYSSSWYEY

SEQ ID NO: 4994 - protein, 9 aa, synthetic construct
AIAAAGFDY

SEQ ID NO: 4995 - protein, 10 aa, synthetic construct
APAGTPYFDY

SEQ ID NO: 4996 - protein, 10 aa, synthetic construct
ASYSSSWYDY

SEQ ID NO: 4997 - protein, 10 aa, synthetic construct
AYINSAYFDY

SEQ ID NO: 4998 - protein, 9 aa, synthetic construct
DDFYYYMDA

SEQ ID NO: 4999 - protein, 10 aa, synthetic construct
DDWNYEAFDI

SEQ ID NO: 5000 - protein, 12 aa, synthetic construct
DDYYYDGSGFDF

SEQ ID NO: 5001 - protein, 9 aa, synthetic construct
DDYYYYMDV

SEQ ID NO: 5002 - protein, 10 aa, synthetic construct
DEAGDDAFDI

SEQ ID NO: 5003 - protein, 10 aa, synthetic construct
DEAGDDAFDI

SEQ ID NO: 5004 - protein, 10 aa, synthetic construct
DEAGDGAFDI

SEQ ID NO: 5005 - protein, 8 aa, synthetic construct
DGWDAFDI

SEQ ID NO: 5006 - protein, 9 aa, synthetic construct
DGWNDDFDY

SEQ ID NO: 5007 - protein, 9 aa, synthetic construct
DGWTDAFDI

SEQ ID NO: 5008 - protein, 5 aa, synthetic construct
DHPYY

SEQ ID NO: 5009 - protein, 9 aa, synthetic construct
DLHSSTLDY

SEQ ID NO: 5010 - protein, 9 aa, synthetic construct
DLHSSTLDY

SEQ ID NO: 5011 - protein, 13 aa, synthetic construct
DLKWEILPDAFDI

SEQ ID NO: 5012 - protein, 13 aa, synthetic construct
DLKWELLPDAFDI

SEQ ID NO: 5013 - protein, 13 aa, synthetic construct
DMGFNWNYGAFNM

SEQ ID NO: 5014 - protein, 8 aa, synthetic construct
DNWNSFDF

SEQ ID NO: 5015 - protein, 9 aa, synthetic construct
DNWNYGFDY

SEQ ID NO: 5016 - protein, 11 aa, synthetic construct
DQEGLTGCHDY

SEQ ID NO: 5017 - protein, 14 aa, synthetic construct
DRNYYGSGSYYGDY

SEQ ID NO: 5018 - protein, 12 aa, synthetic construct
DRSGTTNWFFDL

SEQ ID NO: 5019 - protein, 13 aa, synthetic construct
DRSNWNFGDWFDP

SEQ ID NO: 5020 - protein, 14 aa, synthetic construct
DRYYYGSGTYFFDF

SEQ ID NO: 5021 - protein, 8 aa, synthetic construct
DSRGWFDP

SEQ ID NO: 5022 - protein, 12 aa, synthetic construct
DVGGNYYYNMDV

SEQ ID NO: 5023 - protein, 10 aa, synthetic construct
DYGDYDGMDV

SEQ ID NO: 5024 - protein, 17 aa, synthetic construct
EDIAAVGENYYYYYMDV

SEQ ID NO: 5025 - protein, 17 aa, synthetic construct
EDIAAVGENYYYYYMDV

SEQ ID NO: 5026 - protein, 12 aa, synthetic construct
EDTWNFVPYFDY

SEQ ID NO: 5027 - protein, 16 aa, synthetic construct
EGIAPVDTGYYYYMDV

SEQ ID NO: 5028 - protein, 15 aa, synthetic construct
EGLYFGDLLSYAFDI

SEQ ID NO: 5029 - protein, 16 aa, synthetic construct
EGVAAAGTGFFYYMDV

SEQ ID NO: 5030 - protein, 14 aa, synthetic construct
EGWGINGLGGAFDI

SEQ ID NO: 5031 - protein, 14 aa, synthetic construct
EGWGISGLGGAFDI

SEQ ID NO: 5032 - protein, 14 aa, synthetic construct
EGWGITGQGGALDI

SEQ ID NO: 5033 - protein, 14 aa, synthetic construct
EGWGMTGLGGAFDI

SEQ ID NO: 5034 - protein, 14 aa, synthetic construct
EGWGMTGLGGAFDI

SEQ ID NO: 5035 - protein, 17 aa, synthetic construct
EGYYDFLTGYISDAFDI

SEQ ID NO: 5036 - protein, 17 aa, synthetic construct
EGYYNNSGYYFPDAFDI

SEQ ID NO: 5037 - protein, 16 aa, synthetic construct
EKGLRYSGYDRGYFDY

SEQ ID NO: 5038 - protein, 16 aa, synthetic construct
EMGLRYSGYDRGYFDY

SEQ ID NO: 5039 - protein, 16 aa, synthetic construct
ERGYDSEYYFYYYMDV

SEQ ID NO: 5040 - protein, 17 aa, synthetic construct
ERGYSSPHYYFYYYMDV

SEQ ID NO: 5041 - protein, 10 aa, synthetic construct
ERVAANYFDY

SEQ ID NO: 5042 - protein, 16 aa, synthetic construct
ESGYDDDYYFYYYMDV

SEQ ID NO: 5043 - protein, 12 aa, synthetic construct
ESSSWYGPLFAI

SEQ ID NO: 5044 - protein, 15 aa, synthetic construct
EVYSSSSGGYWYFDL

SEQ ID NO: 5045 - protein, 13 aa, synthetic construct
FVVAPDPIGYFDP

SEQ ID NO: 5046 - protein, 13 aa, synthetic construct
FVVAPVPIGYFDP

SEQ ID NO: 5047 - protein, 13 aa, synthetic construct
FVVEPDLIGWFDP

SEQ ID NO: 5048 - protein, 11 aa, synthetic construct
GAAVDGAGFDY

SEQ ID NO: 5049 - protein, 11 aa, synthetic construct
GATGDGAGFDY

SEQ ID NO: 5050 - protein, 11 aa, synthetic construct
GATVDGAGFDY

SEQ ID NO: 5051 - protein, 12 aa, synthetic construct
GDIAAAGYYFDY

SEQ ID NO: 5052 - protein, 12 aa, synthetic construct
GDIGAAGYYFDY

SEQ ID NO: 5053 - protein, 12 aa, synthetic construct
GDIGTAGFYFDY

SEQ ID NO: 5054 - protein, 12 aa, synthetic construct
GDIGTAGYYFDS

SEQ ID NO: 5055 - protein, 12 aa, synthetic construct
GDVGSAGYFFDY

SEQ ID NO: 5056 - protein, 14 aa, synthetic construct
GDWNYPPYYYYMDV

SEQ ID NO: 5057 - protein, 12 aa, synthetic construct
GEAGSAGFYFDY

SEQ ID NO: 5058 - protein, 8 aa, synthetic construct
GEAGTLDY

SEQ ID NO: 5059 - protein, 12 aa, synthetic construct
GETGTAGYYFDS

SEQ ID NO: 5060 - protein, 12 aa, synthetic construct
GETGTAGYYFDY

SEQ ID NO: 5061 - protein, 12 aa, synthetic construct
GETGTAGYYFDY

SEQ ID NO: 5062 - protein, 12 aa, synthetic construct
GETGTAGYYMDV

SEQ ID NO: 5063 - protein, 12 aa, synthetic construct
GEVGASGYYMDV

SEQ ID NO: 5064 - protein, 12 aa, synthetic construct
GGIAGAGTLFDY

SEQ ID NO: 5065 - protein, 12 aa, synthetic construct
GGIASAGTFFDY

SEQ ID NO: 5066 - protein, 12 aa, synthetic construct
GGIGAAGYYFDY

SEQ ID NO: 5067 - protein, 16 aa, synthetic construct
GGVCSGITCYGYGSDY

SEQ ID NO: 5068 - protein, 16 aa, synthetic construct
GGVCSGTTCYGYGSDY

SEQ ID NO: 5069 - protein, 12 aa, synthetic construct
GGVGPAGYYFDY

SEQ ID NO: 5070 - protein, 14 aa, synthetic construct
GGVYGSRWPKAFDI

SEQ ID NO: 5071 - protein, 12 aa, synthetic construct
GGYDTSGFAFDI

SEQ ID NO: 5072 - protein, 11 aa, synthetic construct
GHLLLPDAFDI

SEQ ID NO: 5073 - protein, 11 aa, synthetic construct
GHLLLPDAFDI

SEQ ID NO: 5074 - protein, 11 aa, synthetic construct
GHQLVPDAFDI

SEQ ID NO: 5075 - protein, 9 aa, synthetic construct
GIAGAAFDY

SEQ ID NO: 5076 - protein, 20 aa, synthetic construct
GKEWGHTNTWYGVNYYYMDV

SEQ ID NO: 5077 - protein, 16 aa, synthetic construct
GKGYDLEYYYYYYMDV

SEQ ID NO: 5078 - protein, 11 aa, synthetic construct
GKWELPDAFDF

SEQ ID NO: 5079 - protein, 12 aa, synthetic construct
GNIGPAGYHFDY

SEQ ID NO: 5080 - protein, 12 aa, synthetic construct
GNVGPAGYHFDY

SEQ ID NO: 5081 - protein, 10 aa, synthetic construct
GPAGTDAFDI

SEQ ID NO: 5082 - protein, 11 aa, synthetic construct
GPSRDGAGFDY

SEQ ID NO: 5083 - protein, 11 aa, synthetic construct
GPSVDGAGFDY

SEQ ID NO: 5084 - protein, 11 aa, synthetic construct
GPTGDGAGFDY

SEQ ID NO: 5085 - protein, 12 aa, synthetic construct
GPTGNYYYFMDV

SEQ ID NO: 5086 - protein, 11 aa, synthetic construct
GQQLVPDAFDI

SEQ ID NO: 5087 - protein, 10 aa, synthetic construct
GSTWPDVFGI

SEQ ID NO: 5088 - protein, 12 aa, synthetic construct
GTIAAAGYYFDY

SEQ ID NO: 5089 - protein, 9 aa, synthetic construct
GTLFNWIDP

SEQ ID NO: 5090 - protein, 12 aa, synthetic construct
GVVGASGYYMDV

SEQ ID NO: 5091 - protein, 11 aa, synthetic construct
GYNWNPDAFDI

SEQ ID NO: 5092 - protein, 10 aa, synthetic construct
HEMGANAFDI

SEQ ID NO: 5093 - protein, 10 aa, synthetic construct
HEVGANAFDI

SEQ ID NO: 5094 - protein, 8 aa, synthetic construct
HGYDSFDY

SEQ ID NO: 5095 - protein, 9 aa, synthetic construct
HYFSSSFDY

SEQ ID NO: 5096 - protein, 12 aa, synthetic construct
KGPTNYYSYMDV

SEQ ID NO: 5097 - protein, 8 aa, synthetic construct
KTQFGFDY

SEQ ID NO: 5098 - protein, 11 aa, synthetic construct
LAADAPKWFDP

SEQ ID NO: 5099 - protein, 13 aa, synthetic construct
LYNWNYGGGFFDY

SEQ ID NO: 5100 - protein, 14 aa, synthetic construct
MVRGIPLYYYFMDV

SEQ ID NO: 5101 - protein, 14 aa, synthetic construct
MVRGLDYYYYYMDV

SEQ ID NO: 5102 - protein, 14 aa, synthetic construct
MVRGLKYYYYYMDV

SEQ ID NO: 5103 - protein, 14 aa, synthetic construct
MVRGLNYYYYHMDV

SEQ ID NO: 5104 - protein, 13 aa, synthetic construct
MVRGLNYYYYMDV

SEQ ID NO: 5105 - protein, 14 aa, synthetic construct
MVRGLNYYYYYMDA

SEQ ID NO: 5106 - protein, 14 aa, synthetic construct
MVRGLNYYYYYMDV

SEQ ID NO: 5107 - protein, 14 aa, synthetic construct
MVRGLNYYYYYMDV

SEQ ID NO: 5108 - protein, 13 aa, synthetic construct
MVRGLTYYYYMDV

SEQ ID NO: 5109 - protein, 14 aa, synthetic construct
MVRGVDYYYYYMDV

SEQ ID NO: 5110 - protein, 13 aa, synthetic construct
MVRGVNYYYYMDV

SEQ ID NO: 5111 - protein, 14 aa, synthetic construct
MVRGVNYYYYYMDV

SEQ ID NO: 5112 - protein, 8 aa, synthetic construct
NGYDSFDY

SEQ ID NO: 5113 - protein, 17 aa, synthetic construct
QGYYDSSGYYFPDAFDI

SEQ ID NO: 5114 - protein, 10 aa, synthetic construct
QNWNYEGFDY

SEQ ID NO: 5115 - protein, 10 aa, synthetic construct
QPLNYDWFDP

SEQ ID NO: 5116 - protein, 11 aa, synthetic construct
RDNWNYDAFDL

SEQ ID NO: 5117 - protein, 8 aa, synthetic construct
RDWNHIDY

SEQ ID NO: 5118 - protein, 11 aa, synthetic construct
RGFKSRWYVDY

SEQ ID NO: 5119 - protein, 11 aa, synthetic construct
RGFRSRWYVDF

SEQ ID NO: 5120 - protein, 15 aa, synthetic construct
RSPRWSSSGSDAFDI

SEQ ID NO: 5121 - protein, 11 aa, synthetic construct
RWNYEKGAFDI

SEQ ID NO: 5122 - protein, 11 aa, synthetic construct
RYNWNYAAFDL

SEQ ID NO: 5123 - protein, 11 aa, synthetic construct
RYNWNYDAFDI

SEQ ID NO: 5124 - protein, 11 aa, synthetic construct
RYNWNYGIFDN

SEQ ID NO: 5125 - protein, 11 aa, synthetic construct
RYNWNYGILDY

SEQ ID NO: 5126 - protein, 11 aa, synthetic construct
RYNWNYGLFDY

SEQ ID NO: 5127 - protein, 11 aa, synthetic construct
RYNWNYGLLDY

SEQ ID NO: 5128 - protein, 11 aa, synthetic construct
RYNWNYVAFDL

SEQ ID NO: 5129 - protein, 11 aa, synthetic construct
SPYGGNPYFDY

SEQ ID NO: 5130 - protein, 9 aa, synthetic construct
SRLPDAFDI

SEQ ID NO: 5131 - protein, 6 aa, synthetic construct
TFPLDY

SEQ ID NO: 5132 - protein, 6 aa, synthetic construct
TWNSDY

SEQ ID NO: 5133 - protein, 6 aa, synthetic construct
TYAFDI

SEQ ID NO: 5134 - protein, 7 aa, synthetic construct
VGDYFDY

SEQ ID NO: 5135 - protein, 13 aa, synthetic construct
VRYSSSWGWYFDL

SEQ ID NO: 5136 - protein, 8 aa, synthetic construct
WDLGSLDY

SEQ ID NO: 5137 - protein, 12 aa, synthetic construct
WNIELFRGYFDY

SEQ ID NO: 5138 - protein, 12 aa, synthetic construct
WNIENFAGYFDL

SEQ ID NO: 5139 - protein, 12 aa, synthetic construct
WNITLFRGYFDY

SEQ ID NO: 5140 - protein, 12 aa, synthetic construct
WNIVGALGYFDL

SEQ ID NO: 5141 - protein, 12 aa, synthetic construct
YYYGSGSYAFDI

SEQ ID NO: 5142 - protein, 11 aa, synthetic construct
RASQGIRGWLA

SEQ ID NO: 5143 - protein, 11 aa, synthetic construct
RASQSISSWLA

SEQ ID NO: 5144 - protein, 14 aa, synthetic construct
TGSSSNIGAGYDVH

SEQ ID NO: 5145 - protein, 11 aa, synthetic construct
RASQGIRNDLG

SEQ ID NO: 5146 - protein, 14 aa, synthetic construct
TGSSSNIGAGYDVH

SEQ ID NO: 5147 - protein, 14 aa, synthetic construct
TGSSSNIGAGYDVH

SEQ ID NO: 5148 - protein, 14 aa, synthetic construct
TGSSSNIGAGYDVH

SEQ ID NO: 5149 - protein, 14 aa, synthetic construct
TGSSSSIGAGYDVH

SEQ ID NO: 5150 - protein, 14 aa, synthetic construct
TGSSSNIGAGYDVH

SEQ ID NO: 5151 - protein, 14 aa, synthetic construct
TGSSSNIVAGYDVH

SEQ ID NO: 5152 - protein, 14 aa, synthetic construct
TGSSSNIGAGYDVH

SEQ ID NO: 5153 - protein, 14 aa, synthetic construct
TGSSSNIGAGYDVH

SEQ ID NO: 5154 - protein, 14 aa, synthetic construct
TGSSSNIGAGYDVH

SEQ ID NO: 5155 - protein, 14 aa, synthetic construct
TGSSSNIGAGYDVH

SEQ ID NO: 5156 - protein, 16 aa, synthetic construct
RSSQSLVSSVGNTYLN

SEQ ID NO: 5157 - protein, 11 aa, synthetic construct
RASQGIGSYLA

SEQ ID NO: 5158 - protein, 11 aa, synthetic construct
RASQGISSYLA

SEQ ID NO: 5159 - protein, 16 aa, synthetic construct
RSSQSLVYSYGNTYLN

SEQ ID NO: 5160 - protein, 11 aa, synthetic construct
RASQGISSYLA

SEQ ID NO: 5161 - protein, 11 aa, synthetic construct
RASQGISSYLA

SEQ ID NO: 5162 - protein, 11 aa, synthetic construct
RASQGISSYLA

SEQ ID NO: 5163 - protein, 11 aa, synthetic construct
RASQSVSSYLA

SEQ ID NO: 5164 - protein, 11 aa, synthetic construct
SGDKLGSKYAF

SEQ ID NO: 5165 - protein, 11 aa, synthetic construct
GGNNIGSENVY

SEQ ID NO: 5166 - protein, 11 aa, synthetic construct
SGDALPKKYAY

SEQ ID NO: 5167 - protein, 16 aa, synthetic construct
RSSQSLVYSDGNTYLN

SEQ ID NO: 5168 - protein, 16 aa, synthetic construct
RSSQSLVYSDGNTYLN

SEQ ID NO: 5169 - protein, 14 aa, synthetic construct
TGTSSDVGGYNYVS

SEQ ID NO: 5170 - protein, 14 aa, synthetic construct
TGTSSDVGGYNYVS

SEQ ID NO: 5171 - protein, 16 aa, synthetic construct
RSSQSLLHSNGYNYLD

SEQ ID NO: 5172 - protein, 16 aa, synthetic construct
RSSRSLVYSDGNTYLN

SEQ ID NO: 5173 - protein, 13 aa, synthetic construct
SGSSSNIGRNPVY

SEQ ID NO: 5174 - protein, 11 aa, synthetic construct
RASQGIAGWLA

SEQ ID NO: 5175 - protein, 14 aa, synthetic construct
TGSSSNIGAGYDVH

SEQ ID NO: 5176 - protein, 11 aa, synthetic construct
RASQSISNWLA

SEQ ID NO: 5177 - protein, 11 aa, synthetic construct
SGDKLGDKYVS

SEQ ID NO: 5178 - protein, 13 aa, synthetic construct
SGSSSNIGSNTVN

SEQ ID NO: 5179 - protein, 11 aa, synthetic construct
RASQSISSYLN

SEQ ID NO: 5180 - protein, 11 aa, synthetic construct
GGNNIGSKSVH

SEQ ID NO: 5181 - protein, 11 aa, synthetic construct
RASQSISSYLN

SEQ ID NO: 5182 - protein, 13 aa, synthetic construct
SGSSSNIGSNTVN

SEQ ID NO: 5183 - protein, 13 aa, synthetic construct
SGSSSNIGSNTVN

SEQ ID NO: 5184 - protein, 14 aa, synthetic construct
TGTSSDVGGYNYVS

SEQ ID NO: 5185 - protein, 14 aa, synthetic construct
TGSSSNIGAGYDVH

SEQ ID NO: 5186 - protein, 11 aa, synthetic construct
SGDALPKKYAY

SEQ ID NO: 5187 - protein, 14 aa, synthetic construct
TGSSSNIGSGYDVH

SEQ ID NO: 5188 - protein, 11 aa, synthetic construct
RASQGIRNDLG

SEQ ID NO: 5189 - protein, 11 aa, synthetic construct
RASQGISSYLA

SEQ ID NO: 5190 - protein, 11 aa, synthetic construct
RASQGISSYLA

SEQ ID NO: 5191 - protein, 11 aa, synthetic construct
RASQGIRNDLG

SEQ ID NO: 5192 - protein, 11 aa, synthetic construct
RASQSVSRYLA

SEQ ID NO: 5193 - protein, 16 aa, synthetic construct
RSSQSLVYSDGNTYLN

SEQ ID NO: 5194 - protein, 16 aa, synthetic construct
RSSQSLVYSDGNTYLN

SEQ ID NO: 5195 - protein, 11 aa, synthetic construct
RASQSVSSNLA

SEQ ID NO: 5196 - protein, 11 aa, synthetic construct
RASQSVHKYLA

SEQ ID NO: 5197 - protein, 14 aa, synthetic construct
TGSSSNIGAGYDVH

SEQ ID NO: 5198 - protein, 14 aa, synthetic construct
TGSSSNIGAGYDVH

SEQ ID NO: 5199 - protein, 11 aa, synthetic construct
SGDKLGNKYAS

SEQ ID NO: 5200 - protein, 14 aa, synthetic construct
TGSSSNIGAGYDVH

SEQ ID NO: 5201 - protein, 11 aa, synthetic construct
RASQGISSYLA

SEQ ID NO: 5202 - protein, 11 aa, synthetic construct
RASQSISSYLN

SEQ ID NO: 5203 - protein, 11 aa, synthetic construct
RAGQSISSYLN

SEQ ID NO: 5204 - protein, 11 aa, synthetic construct
RASQSISSYLN

SEQ ID NO: 5205 - protein, 11 aa, synthetic construct
RASQSISSYLN

SEQ ID NO: 5206 - protein, 11 aa, synthetic construct
SGDKLGNKYAS

SEQ ID NO: 5207 - protein, 11 aa, synthetic construct
SGDKLGDKYVS

SEQ ID NO: 5208 - protein, 11 aa, synthetic construct
SGDKLGYKYAS

SEQ ID NO: 5209 - protein, 11 aa, synthetic construct
RASQSISSYLN

SEQ ID NO: 5210 - protein, 11 aa, synthetic construct
RASQSISSYLN

SEQ ID NO: 5211 - protein, 11 aa, synthetic construct
RASQSIGSYLN

SEQ ID NO: 5212 - protein, 11 aa, synthetic construct
RASRNIGTYLN

SEQ ID NO: 5213 - protein, 11 aa, synthetic construct
RASQSISNYLN

SEQ ID NO: 5214 - protein, 14 aa, synthetic construct
TGTSSDVGGYNYVS

SEQ ID NO: 5215 - protein, 11 aa, synthetic construct
RASQSISSYLN

SEQ ID NO: 5216 - protein, 16 aa, synthetic construct
RSSQSLVYSDGNTYLN

SEQ ID NO: 5217 - protein, 11 aa, synthetic construct
RASQTIISYLN

SEQ ID NO: 5218 - protein, 11 aa, synthetic construct
RASQSISSYLN

SEQ ID NO: 5219 - protein, 11 aa, synthetic construct
RASQSISSYLN

SEQ ID NO: 5220 - protein, 11 aa, synthetic construct
RASQSISSYLN

SEQ ID NO: 5221 - protein, 11 aa, synthetic construct
RASQSISSYLN

SEQ ID NO: 5222 - protein, 11 aa, synthetic construct
RASQSISSYLN

SEQ ID NO: 5223 - protein, 11 aa, synthetic construct
RASQSISSYLN

SEQ ID NO: 5224 - protein, 11 aa, synthetic construct
RASQSISTYLN

SEQ ID NO: 5225 - protein, 14 aa, synthetic construct
TGSSSNIGAGYDVH

SEQ ID NO: 5226 - protein, 14 aa, synthetic construct
TGSSSNIGAGYDVH

SEQ ID NO: 5227 - protein, 11 aa, synthetic construct
RASQSISSYLN

SEQ ID NO: 5228 - protein, 11 aa, synthetic construct
RASQSISTYLN

SEQ ID NO: 5229 - protein, 11 aa, synthetic construct
RASQGISNYLA

SEQ ID NO: 5230 - protein, 11 aa, synthetic construct
RASQSISSYLN

SEQ ID NO: 5231 - protein, 11 aa, synthetic construct
RASQSISSYLN

SEQ ID NO: 5232 - protein, 11 aa, synthetic construct
RASQNISSWLD

SEQ ID NO: 5233 - protein, 14 aa, synthetic construct
TGTSSDVGGYNYVS

SEQ ID NO: 5234 - protein, 14 aa, synthetic construct
TGSSSNIGAGYDVH

SEQ ID NO: 5235 - protein, 14 aa, synthetic construct
TGSSSNIGAGYDVH

SEQ ID NO: 5236 - protein, 11 aa, synthetic construct
RASQGISSWLA

SEQ ID NO: 5237 - protein, 11 aa, synthetic construct
RASQTISSYLN

SEQ ID NO: 5238 - protein, 11 aa, synthetic construct
RASQSISSNLN

SEQ ID NO: 5239 - protein, 14 aa, synthetic construct
TGTSSDVGGYNYVS

SEQ ID NO: 5240 - protein, 11 aa, synthetic construct
SGDKLGNKYAS

SEQ ID NO: 5241 - protein, 11 aa, synthetic construct
SGDKLGDKYAS

SEQ ID NO: 5242 - protein, 11 aa, synthetic construct
SGDKLGNKYVS

SEQ ID NO: 5243 - protein, 11 aa, synthetic construct
GGNNIGSKSVN

SEQ ID NO: 5244 - protein, 11 aa, synthetic construct
RASQGISRWLD

SEQ ID NO: 5245 - protein, 11 aa, synthetic construct
RASQAIRRWLA

SEQ ID NO: 5246 - protein, 11 aa, synthetic construct
RASQSISSYLN

SEQ ID NO: 5247 - protein, 14 aa, synthetic construct
TGTSSDVGGYNYVS

SEQ ID NO: 5248 - protein, 11 aa, synthetic construct
RASQSISRYLN

SEQ ID NO: 5249 - protein, 11 aa, synthetic construct
RASQSIRSYLN

SEQ ID NO: 5250 - protein, 11 aa, synthetic construct
SGDALPKKYAY

SEQ ID NO: 5251 - protein, 11 aa, synthetic construct
SGDALPKKYAY

SEQ ID NO: 5252 - protein, 11 aa, synthetic construct
RASQSVSKYLA

SEQ ID NO: 5253 - protein, 14 aa, synthetic construct
TGTSSDVGGYNYVS

SEQ ID NO: 5254 - protein, 12 aa, synthetic construct
RASQSVSSSYLA

SEQ ID NO: 5255 - protein, 14 aa, synthetic construct
TGSSSKIGAGYDVH

SEQ ID NO: 5256 - protein, 11 aa, synthetic construct
QGDSLRNYYAS

SEQ ID NO: 5257 - protein, 14 aa, synthetic construct
TGSSSNIGAGYDVH

SEQ ID NO: 5258 - protein, 11 aa, synthetic construct
RASQGLRNWLA

SEQ ID NO: 5259 - protein, 11 aa, synthetic construct
RASQGISSWLV

SEQ ID NO: 5260 - protein, 11 aa, synthetic construct
RASQGISSWLA

SEQ ID NO: 5261 - protein, 11 aa, synthetic construct
RASQGISSWLA

SEQ ID NO: 5262 - protein, 11 aa, synthetic construct
RASQGISSWLA

SEQ ID NO: 5263 - protein, 11 aa, synthetic construct
RASQGISSWLA

SEQ ID NO: 5264 - protein, 11 aa, synthetic construct
RASQGISSWLA

SEQ ID NO: 5265 - protein, 11 aa, synthetic construct
RASQGISSWLA

SEQ ID NO: 5266 - protein, 11 aa, synthetic construct
RASQGLSNWLA

SEQ ID NO: 5267 - protein, 11 aa, synthetic construct
RASQGISRWLA

SEQ ID NO: 5268 - protein, 11 aa, synthetic construct
RASQGLSNWLA

SEQ ID NO: 5269 - protein, 11 aa, synthetic construct
RASQGISSWLA

SEQ ID NO: 5270 - protein, 11 aa, synthetic construct
RASQSVSSYLA

SEQ ID NO: 5271 - protein, 16 aa, synthetic construct
RSSQSLVYSDGNTYLN

SEQ ID NO: 5272 - protein, 11 aa, synthetic construct
RASQGIRNDLG

SEQ ID NO: 5273 - protein, 14 aa, synthetic construct
TGTSSDVGGYNYVS

SEQ ID NO: 5274 - protein, 11 aa, synthetic construct
RASQSISSYLN

SEQ ID NO: 5275 - protein, 11 aa, synthetic construct
SGDALPKKYAY

SEQ ID NO: 5276 - protein, 11 aa, synthetic construct
RASQSIGSYLA

SEQ ID NO: 5277 - protein, 11 aa, synthetic construct
RASQSVSSYLA

SEQ ID NO: 5278 - protein, 13 aa, synthetic construct
SGSSSNIGSNTVN

SEQ ID NO: 5279 - protein, 11 aa, synthetic construct
RASQISSRHLN

SEQ ID NO: 5280 - protein, 11 aa, synthetic construct
RASQSISSYLN

SEQ ID NO: 5281 - protein, 11 aa, synthetic construct
RASQSISSYLN

SEQ ID NO: 5282 - protein, 11 aa, synthetic construct
QGDSLRSYYAS

SEQ ID NO: 5283 - protein, 11 aa, synthetic construct
QGDSLRSYYAS

SEQ ID NO: 5284 - protein, 11 aa, synthetic construct
QGDSLRSYYAS

SEQ ID NO: 5285 - protein, 11 aa, synthetic construct
QGDSLRSYYAS

SEQ ID NO: 5286 - protein, 11 aa, synthetic construct
RASQSISSYLN

SEQ ID NO: 5287 - protein, 11 aa, synthetic construct
SGDKLGDKYAS

SEQ ID NO: 5288 - protein, 11 aa, synthetic construct
RASQNINSYLN

SEQ ID NO: 5289 - protein, 11 aa, synthetic construct
RASQSISSYLN

SEQ ID NO: 5290 - protein, 11 aa, synthetic construct
RASQSISSYFN

SEQ ID NO: 5291 - protein, 11 aa, synthetic construct
RASQSISSYLN

SEQ ID NO: 5292 - protein, 14 aa, synthetic construct
TGTSSDVGGYNYVS

SEQ ID NO: 5293 - protein, 11 aa, synthetic construct
RASQSISSYLN

SEQ ID NO: 5294 - protein, 16 aa, synthetic construct
RSSQSLVYSDGNTYLN

SEQ ID NO: 5295 - protein, 11 aa, synthetic construct
RASQSTSSYLN

SEQ ID NO: 5296 - protein, 11 aa, synthetic construct
RASQSISSYLN

SEQ ID NO: 5297 - protein, 11 aa, synthetic construct
RASQSISSYLN

SEQ ID NO: 5298 - protein, 11 aa, synthetic construct
RASQSISSYLN

SEQ ID NO: 5299 - protein, 14 aa, synthetic construct
TGTSSDVGGYNYVS

SEQ ID NO: 5300 - protein, 7 aa, synthetic construct
SASSLQS

SEQ ID NO: 5301 - protein, 7 aa, synthetic construct
KASSLES

SEQ ID NO: 5302 - protein, 7 aa, synthetic construct
GNSNRPS

SEQ ID NO: 5303 - protein, 7 aa, synthetic construct
AASSLQS

SEQ ID NO: 5304 - protein, 7 aa, synthetic construct
GNSNRPS

SEQ ID NO: 5305 - protein, 7 aa, synthetic construct
GNSNRPS

SEQ ID NO: 5306 - protein, 7 aa, synthetic construct
GNSNRPS

SEQ ID NO: 5307 - protein, 7 aa, synthetic construct
GNSNRPS

SEQ ID NO: 5308 - protein, 7 aa, synthetic construct
GNSNRPS

SEQ ID NO: 5309 - protein, 7 aa, synthetic construct
GNTNRPS

SEQ ID NO: 5310 - protein, 7 aa, synthetic construct
GNSNRPS

SEQ ID NO: 5311 - protein, 7 aa, synthetic construct
GNSNRPS

SEQ ID NO: 5312 - protein, 7 aa, synthetic construct
GNSNRPS

SEQ ID NO: 5313 - protein, 7 aa, synthetic construct
GNSNRPS

SEQ ID NO: 5314 - protein, 7 aa, synthetic construct
KVSDRDS

SEQ ID NO: 5315 - protein, 7 aa, synthetic construct
AASTLQS

SEQ ID NO: 5316 - protein, 7 aa, synthetic construct
AASTLQS

SEQ ID NO: 5317 - protein, 7 aa, synthetic construct
KVSNRDS

SEQ ID NO: 5318 - protein, 7 aa, synthetic construct
AASSLQG

SEQ ID NO: 5319 - protein, 7 aa, synthetic construct
AASTLQS

SEQ ID NO: 5320 - protein, 7 aa, synthetic construct
AASTLQS

SEQ ID NO: 5321 - protein, 7 aa, synthetic construct
DASNRAT

SEQ ID NO: 5322 - protein, 7 aa, synthetic construct
QDNKRPS

SEQ ID NO: 5323 - protein, 7 aa, synthetic construct
RDSNRPS

SEQ ID NO: 5324 - protein, 7 aa, synthetic construct
EDSKRPS

SEQ ID NO: 5325 - protein, 7 aa, synthetic construct
KVSNRDS

SEQ ID NO: 5326 - protein, 7 aa, synthetic construct
KVSNRDS

SEQ ID NO: 5327 - protein, 7 aa, synthetic construct
EVSNRPS

SEQ ID NO: 5328 - protein, 7 aa, synthetic construct
EVSNRPS

SEQ ID NO: 5329 - protein, 7 aa, synthetic construct
LGSNRAS

SEQ ID NO: 5330 - protein, 7 aa, synthetic construct
KVSNRDS

SEQ ID NO: 5331 - protein, 7 aa, synthetic construct
DNNQRPS

SEQ ID NO: 5332 - protein, 7 aa, synthetic construct
SASSLQS

SEQ ID NO: 5333 - protein, 7 aa, synthetic construct
GNSNRPS

SEQ ID NO: 5334 - protein, 7 aa, synthetic construct
KASSLQS

SEQ ID NO: 5335 - protein, 7 aa, synthetic construct
QDSERPS

SEQ ID NO: 5336 - protein, 7 aa, synthetic construct
SNNQRPS

SEQ ID NO: 5337 - protein, 7 aa, synthetic construct
AASSLQS

SEQ ID NO: 5338 - protein, 7 aa, synthetic construct
YDSDRPS

SEQ ID NO: 5339 - protein, 7 aa, synthetic construct
AASSLQS

SEQ ID NO: 5340 - protein, 7 aa, synthetic construct
SNNQRPS

SEQ ID NO: 5341 - protein, 7 aa, synthetic construct
SNNQRPS

SEQ ID NO: 5342 - protein, 7 aa, synthetic construct
DVSKRPS

SEQ ID NO: 5343 - protein, 7 aa, synthetic construct
GNSNRPS

SEQ ID NO: 5344 - protein, 7 aa, synthetic construct
EDSKRPS

SEQ ID NO: 5345 - protein, 7 aa, synthetic construct
GNSNRPS

SEQ ID NO: 5346 - protein, 7 aa, synthetic construct
AASTLQS

SEQ ID NO: 5347 - protein, 7 aa, synthetic construct
AASTLQS

SEQ ID NO: 5348 - protein, 7 aa, synthetic construct
AASTLQS

SEQ ID NO: 5349 - protein, 7 aa, synthetic construct
AASSLQS

SEQ ID NO: 5350 - protein, 7 aa, synthetic construct
DASNRAT

SEQ ID NO: 5351 - protein, 7 aa, synthetic construct
KVSNRDS

SEQ ID NO: 5352 - protein, 7 aa, synthetic construct
KVSNRDS

SEQ ID NO: 5353 - protein, 7 aa, synthetic construct
GASTRAT

SEQ ID NO: 5354 - protein, 7 aa, synthetic construct
DASSRAT

SEQ ID NO: 5355 - protein, 7 aa, synthetic construct
GNSNRPS

SEQ ID NO: 5356 - protein, 7 aa, synthetic construct
GNSNRPS

SEQ ID NO: 5357 - protein, 7 aa, synthetic construct
QDRKRPS

SEQ ID NO: 5358 - protein, 7 aa, synthetic construct
GNGNRPS

SEQ ID NO: 5359 - protein, 7 aa, synthetic construct
AASTLQS

SEQ ID NO: 5360 - protein, 7 aa, synthetic construct
AASSLQS

SEQ ID NO: 5361 - protein, 7 aa, synthetic construct
AASSLQS

SEQ ID NO: 5362 - protein, 7 aa, synthetic construct
AASSLQS

SEQ ID NO: 5363 - protein, 7 aa, synthetic construct
AASSLQG

SEQ ID NO: 5364 - protein, 7 aa, synthetic construct
QDSKRPS

SEQ ID NO: 5365 - protein, 7 aa, synthetic construct
QDRKRPS

SEQ ID NO: 5366 - protein, 7 aa, synthetic construct
QDRKRPS

SEQ ID NO: 5367 - protein, 7 aa, synthetic construct
AASSLQS

SEQ ID NO: 5368 - protein, 7 aa, synthetic construct
AASSLQS

SEQ ID NO: 5369 - protein, 7 aa, synthetic construct
GASGLQS

SEQ ID NO: 5370 - protein, 7 aa, synthetic construct
AASSLQS

SEQ ID NO: 5371 - protein, 7 aa, synthetic construct
AASSLQS

SEQ ID NO: 5372 - protein, 7 aa, synthetic construct
EVSNRPS

SEQ ID NO: 5373 - protein, 7 aa, synthetic construct
AASSLQS

SEQ ID NO: 5374 - protein, 7 aa, synthetic construct
EVSNRDS

SEQ ID NO: 5375 - protein, 7 aa, synthetic construct
AASSLHS

SEQ ID NO: 5376 - protein, 7 aa, synthetic construct
AASSLQG

SEQ ID NO: 5377 - protein, 7 aa, synthetic construct
AASSLQS

SEQ ID NO: 5378 - protein, 7 aa, synthetic construct
AASSLQS

SEQ ID NO: 5379 - protein, 7 aa, synthetic construct
AASSLQS

SEQ ID NO: 5380 - protein, 7 aa, synthetic construct
AASSLQS

SEQ ID NO: 5381 - protein, 7 aa, synthetic construct
AASSLQT

SEQ ID NO: 5382 - protein, 7 aa, synthetic construct
AASSLQS

SEQ ID NO: 5383 - protein, 7 aa, synthetic construct
GNSNRPS

SEQ ID NO: 5384 - protein, 7 aa, synthetic construct
GNSNRPS

SEQ ID NO: 5385 - protein, 7 aa, synthetic construct
AASSLQS

SEQ ID NO: 5386 - protein, 7 aa, synthetic construct
AASSLQS

SEQ ID NO: 5387 - protein, 7 aa, synthetic construct
AASTLQS

SEQ ID NO: 5388 - protein, 7 aa, synthetic construct
GASRLQS

SEQ ID NO: 5389 - protein, 7 aa, synthetic construct
GASRLQS

SEQ ID NO: 5390 - protein, 7 aa, synthetic construct
AASRLQS

SEQ ID NO: 5391 - protein, 7 aa, synthetic construct
DVSKRPS

SEQ ID NO: 5392 - protein, 7 aa, synthetic construct
GNSNRPS

SEQ ID NO: 5393 - protein, 7 aa, synthetic construct
GNSNRPS

SEQ ID NO: 5394 - protein, 7 aa, synthetic construct
AASRLQS

SEQ ID NO: 5395 - protein, 7 aa, synthetic construct
AASSLQS

SEQ ID NO: 5396 - protein, 7 aa, synthetic construct
AASNLQT

SEQ ID NO: 5397 - protein, 7 aa, synthetic construct
EVNKRPS

SEQ ID NO: 5398 - protein, 7 aa, synthetic construct
QDSKRPS

SEQ ID NO: 5399 - protein, 7 aa, synthetic construct
QDSKRPS

SEQ ID NO: 5400 - protein, 7 aa, synthetic construct
QDSKRPS

SEQ ID NO: 5401 - protein, 7 aa, synthetic construct
YDSDRPS

SEQ ID NO: 5402 - protein, 7 aa, synthetic construct
AASSLQS

SEQ ID NO: 5403 - protein, 7 aa, synthetic construct
SASSLHS

SEQ ID NO: 5404 - protein, 7 aa, synthetic construct
AASSLQS

SEQ ID NO: 5405 - protein, 7 aa, synthetic construct
DVSKRPS

SEQ ID NO: 5406 - protein, 7 aa, synthetic construct
AASSLQS

SEQ ID NO: 5407 - protein, 7 aa, synthetic construct
GASSLQR

SEQ ID NO: 5408 - protein, 7 aa, synthetic construct
EDSKRPS

SEQ ID NO: 5409 - protein, 7 aa, synthetic construct
EDSKRPS

SEQ ID NO: 5410 - protein, 7 aa, synthetic construct
DASNRAT

SEQ ID NO: 5411 - protein, 7 aa, synthetic construct
EVSNRPS

SEQ ID NO: 5412 - protein, 7 aa, synthetic construct
GASSRAT

SEQ ID NO: 5413 - protein, 7 aa, synthetic construct
GNSNRPS

SEQ ID NO: 5414 - protein, 7 aa, synthetic construct
GNNNRPS

SEQ ID NO: 5415 - protein, 7 aa, synthetic construct
GNSNRPS

SEQ ID NO: 5416 - protein, 7 aa, synthetic construct
AASGLQG

SEQ ID NO: 5417 - protein, 7 aa, synthetic construct
AASSLQS

SEQ ID NO: 5418 - protein, 7 aa, synthetic construct
AASSLQS

SEQ ID NO: 5419 - protein, 7 aa, synthetic construct
AASSLQS

SEQ ID NO: 5420 - protein, 7 aa, synthetic construct
AASSLQS

SEQ ID NO: 5421 - protein, 7 aa, synthetic construct
AASSLQS

SEQ ID NO: 5422 - protein, 7 aa, synthetic construct
AASSLQS

SEQ ID NO: 5423 - protein, 7 aa, synthetic construct
AASSLQS

SEQ ID NO: 5424 - protein, 7 aa, synthetic construct
AASSLQS

SEQ ID NO: 5425 - protein, 7 aa, synthetic construct
AASSLQS

SEQ ID NO: 5426 - protein, 7 aa, synthetic construct
AASGLQG

SEQ ID NO: 5427 - protein, 7 aa, synthetic construct
AASSLQS

SEQ ID NO: 5428 - protein, 7 aa, synthetic construct
DASNRAT

SEQ ID NO: 5429 - protein, 7 aa, synthetic construct
KVSNRDS

SEQ ID NO: 5430 - protein, 7 aa, synthetic construct
AASSLQS

SEQ ID NO: 5431 - protein, 7 aa, synthetic construct
DVSKRSS

SEQ ID NO: 5432 - protein, 7 aa, synthetic construct
AASSLQS

SEQ ID NO: 5433 - protein, 7 aa, synthetic construct
EDSKRPS

SEQ ID NO: 5434 - protein, 7 aa, synthetic construct
DASNRAT

SEQ ID NO: 5435 - protein, 7 aa, synthetic construct
DASNRAT

SEQ ID NO: 5436 - protein, 7 aa, synthetic construct
SNNQRPS

SEQ ID NO: 5437 - protein, 7 aa, synthetic construct
AASSLQG

SEQ ID NO: 5438 - protein, 7 aa, synthetic construct
AASSLQS

SEQ ID NO: 5439 - protein, 7 aa, synthetic construct
AASSLQS

SEQ ID NO: 5440 - protein, 7 aa, synthetic construct
GKNNRPS

SEQ ID NO: 5441 - protein, 7 aa, synthetic construct
GKNNRPS

SEQ ID NO: 5442 - protein, 7 aa, synthetic construct
GKNNRPS

SEQ ID NO: 5443 - protein, 7 aa, synthetic construct
GKNNRPS

SEQ ID NO: 5444 - protein, 7 aa, synthetic construct
AASSLQS

SEQ ID NO: 5445 - protein, 7 aa, synthetic construct
QDNKRPS

SEQ ID NO: 5446 - protein, 7 aa, synthetic construct
AASSLQS

SEQ ID NO: 5447 - protein, 7 aa, synthetic construct
AASSLQS

SEQ ID NO: 5448 - protein, 7 aa, synthetic construct
AASSLQS

SEQ ID NO: 5449 - protein, 7 aa, synthetic construct
AASSSQS

SEQ ID NO: 5450 - protein, 7 aa, synthetic construct
DVSKRPS

SEQ ID NO: 5451 - protein, 7 aa, synthetic construct
AASSLQS

SEQ ID NO: 5452 - protein, 7 aa, synthetic construct
KVSNRDS

SEQ ID NO: 5453 - protein, 7 aa, synthetic construct
AASSLQS

SEQ ID NO: 5454 - protein, 7 aa, synthetic construct
AASSLQS

SEQ ID NO: 5455 - protein, 7 aa, synthetic construct
AASSLQS

SEQ ID NO: 5456 - protein, 7 aa, synthetic construct
AASSLQS

SEQ ID NO: 5457 - protein, 7 aa, synthetic construct
EVSNRPS

SEQ ID NO: 5458 - protein, 9 aa, synthetic construct
QQSYSTPLT

SEQ ID NO: 5459 - protein, 9 aa, synthetic construct
QQSYSSPLT

SEQ ID NO: 5460 - protein, 11 aa, synthetic construct
QSYDSSLSGWV

SEQ ID NO: 5461 - protein, 9 aa, synthetic construct
LQDYNYPFT

SEQ ID NO: 5462 - protein, 11 aa, synthetic construct
QSYDSSLSGWV

SEQ ID NO: 5463 - protein, 12 aa, synthetic construct
QSYDSRLSGNWV

SEQ ID NO: 5464 - protein, 11 aa, synthetic construct
QSYDSSLSGYV

SEQ ID NO: 5465 - protein, 11 aa, synthetic construct
QSYDSSLSGWV

SEQ ID NO: 5466 - protein, 11 aa, synthetic construct
QSYDSSLSGWV

SEQ ID NO: 5467 - protein, 11 aa, synthetic construct
QSYDSSLSGWV

SEQ ID NO: 5468 - protein, 11 aa, synthetic construct
QSYDSSLSGSV

SEQ ID NO: 5469 - protein, 11 aa, synthetic construct
QSYDSSLSGWV

SEQ ID NO: 5470 - protein, 11 aa, synthetic construct
QSYDSSLSGWV

SEQ ID NO: 5471 - protein, 11 aa, synthetic construct
QSYDSSLSGWV

SEQ ID NO: 5472 - protein, 9 aa, synthetic construct
MQGTHWPPT

SEQ ID NO: 5473 - protein, 9 aa, synthetic construct
QQLNSYPLT

SEQ ID NO: 5474 - protein, 9 aa, synthetic construct
QQFHSYPFT

SEQ ID NO: 5475 - protein, 9 aa, synthetic construct
MQGTYWPPT

SEQ ID NO: 5476 - protein, 9 aa, synthetic construct
LQDYNYPLT

SEQ ID NO: 5477 - protein, 9 aa, synthetic construct
QQLNSYPIT

SEQ ID NO: 5478 - protein, 9 aa, synthetic construct
QQLNSYPLT

SEQ ID NO: 5479 - protein, 9 aa, synthetic construct
QQRSNWPYT

SEQ ID NO: 5480 - protein, 9 aa, synthetic construct
QAWDGSSAV

SEQ ID NO: 5481 - protein, 9 aa, synthetic construct
QVWDSSTVV

SEQ ID NO: 5482 - protein, 11 aa, synthetic construct
YSTDSSGNHYV

SEQ ID NO: 5483 - protein, 9 aa, synthetic construct
MQGTHWPRT

SEQ ID NO: 5484 - protein, 9 aa, synthetic construct
MQGTHWPRT

SEQ ID NO: 5485 - protein, 11 aa, synthetic construct
SSYTSSSTLVV

SEQ ID NO: 5486 - protein, 10 aa, synthetic construct
SSYTSSSTLV

SEQ ID NO: 5487 - protein, 9 aa, synthetic construct
MQGLQTPWT

SEQ ID NO: 5488 - protein, 10 aa, synthetic construct
MQGTNWPPYT

SEQ ID NO: 5489 - protein, 9 aa, synthetic construct
AAWDDSLEV

SEQ ID NO: 5490 - protein, 9 aa, synthetic construct
QQANSFPRT

SEQ ID NO: 5491 - protein, 12 aa, synthetic construct
QSYDSSLSGSMV

SEQ ID NO: 5492 - protein, 8 aa, synthetic construct
QQYKSFIT

SEQ ID NO: 5493 - protein, 9 aa, synthetic construct
QAWDSSTVV

SEQ ID NO: 5494 - protein, 11 aa, synthetic construct
AAWDDSLNGVV

SEQ ID NO: 5495 - protein, 9 aa, synthetic construct
QQSYSTPLT

SEQ ID NO: 5496 - protein, 11 aa, synthetic construct
QVWDSSSDHVV

SEQ ID NO: 5497 - protein, 9 aa, synthetic construct
QQSYSTPIT

SEQ ID NO: 5498 - protein, 11 aa, synthetic construct
AAWDDSLNGYV

SEQ ID NO: 5499 - protein, 11 aa, synthetic construct
AAWDDSLNGYV

SEQ ID NO: 5500 - protein, 10 aa, synthetic construct
SSYTSSSTLV

SEQ ID NO: 5501 - protein, 11 aa, synthetic construct
QSYDSSLSGWV

SEQ ID NO: 5502 - protein, 11 aa, synthetic construct
YSTDSSGNHRV

SEQ ID NO: 5503 - protein, 11 aa, synthetic construct
QSYDSSLSGWV

SEQ ID NO: 5504 - protein, 9 aa, synthetic construct
QQLNSYPIT

SEQ ID NO: 5505 - protein, 9 aa, synthetic construct
QQLNSYPFT

SEQ ID NO: 5506 - protein, 9 aa, synthetic construct
QQLNSYPHT

SEQ ID NO: 5507 - protein, 9 aa, synthetic construct
LQLNSYPLT

SEQ ID NO: 5508 - protein, 10 aa, synthetic construct
QQRSNWPPIT

SEQ ID NO: 5509 - protein, 9 aa, synthetic construct
MQGTHWPFT

SEQ ID NO: 5510 - protein, 9 aa, synthetic construct
MQGTHWPFT

SEQ ID NO: 5511 - protein, 9 aa, synthetic construct
QQRSNWPLT

SEQ ID NO: 5512 - protein, 9 aa, synthetic construct
QQRSNWPLT

SEQ ID NO: 5513 - protein, 11 aa, synthetic construct
QSYDSSLSGYV

SEQ ID NO: 5514 - protein, 11 aa, synthetic construct
QSYDSSLSGYV

SEQ ID NO: 5515 - protein, 10 aa, synthetic construct
QAWDSSTYVI

SEQ ID NO: 5516 - protein, 11 aa, synthetic construct
QSYDSSLSGYV

SEQ ID NO: 5517 - protein, 9 aa, synthetic construct
QQLNSYPLT

SEQ ID NO: 5518 - protein, 9 aa, synthetic construct
QQSYSTPFT

SEQ ID NO: 5519 - protein, 9 aa, synthetic construct
QQSYSTPFT

SEQ ID NO: 5520 - protein, 9 aa, synthetic construct
QQSYSTPFT

SEQ ID NO: 5521 - protein, 9 aa, synthetic construct
QQSYSTPLT

SEQ ID NO: 5522 - protein, 10 aa, synthetic construct
QAWDSSTAVV

SEQ ID NO: 5523 - protein, 10 aa, synthetic construct
QAWDSSTAVV

SEQ ID NO: 5524 - protein, 10 aa, synthetic construct
QAWDSSTAVV

SEQ ID NO: 5525 - protein, 9 aa, synthetic construct
QQSYSTPLT

SEQ ID NO: 5526 - protein, 9 aa, synthetic construct
QQSYSPPLT

SEQ ID NO: 5527 - protein, 9 aa, synthetic construct
QQSFSTPFT

SEQ ID NO: 5528 - protein, 9 aa, synthetic construct
QQSFSTPYT

SEQ ID NO: 5529 - protein, 9 aa, synthetic construct
QQTYSTPLT

SEQ ID NO: 5530 - protein, 10 aa, synthetic construct
SSYTSSSTVV

SEQ ID NO: 5531 - protein, 8 aa, synthetic construct
QQSYSALT

SEQ ID NO: 5532 - protein, 9 aa, synthetic construct
MQGTHWPYT

SEQ ID NO: 5533 - protein, 9 aa, synthetic construct
QQSYSTPIT

SEQ ID NO: 5534 - protein, 9 aa, synthetic construct
QQSYSTPLT

SEQ ID NO: 5535 - protein, 9 aa, synthetic construct
QQSYSPPLT

SEQ ID NO: 5536 - protein, 9 aa, synthetic construct
QQSYSTPLT

SEQ ID NO: 5537 - protein, 9 aa, synthetic construct
QQSYSTPLT

SEQ ID NO: 5538 - protein, 9 aa, synthetic construct
QQSYSTPLT

SEQ ID NO: 5539 - protein, 9 aa, synthetic construct
QQSYSTPLT

SEQ ID NO: 5540 - protein, 9 aa, synthetic construct
QQSYSTPIT

SEQ ID NO: 5541 - protein, 11 aa, synthetic construct
QSYDSSLSGWV

SEQ ID NO: 5542 - protein, 11 aa, synthetic construct
QSYDSSLSGWV

SEQ ID NO: 5543 - protein, 9 aa, synthetic construct
QQTYSTPLT

SEQ ID NO: 5544 - protein, 9 aa, synthetic construct
QQSYSTPLT

SEQ ID NO: 5545 - protein, 9 aa, synthetic construct
QQANSFPPT

SEQ ID NO: 5546 - protein, 9 aa, synthetic construct
QQSYSTPIT

SEQ ID NO: 5547 - protein, 9 aa, synthetic construct
QQSYSTPIT

SEQ ID NO: 5548 - protein, 9 aa, synthetic construct
QQSYSTPLT

SEQ ID NO: 5549 - protein, 11 aa, synthetic construct
LSYDSSLSGSV

SEQ ID NO: 5550 - protein, 11 aa, synthetic construct
QSYDSSLSGWV

SEQ ID NO: 5551 - protein, 11 aa, synthetic construct
QSYDSSLSGSV

SEQ ID NO: 5552 - protein, 9 aa, synthetic construct
QQSYSTPLT

SEQ ID NO: 5553 - protein, 9 aa, synthetic construct
QQSYGTPLT

SEQ ID NO: 5554 - protein, 9 aa, synthetic construct
QQSYGLPLT

SEQ ID NO: 5555 - protein, 10 aa, synthetic construct
SSYAGSNNLV

SEQ ID NO: 5556 - protein, 10 aa, synthetic construct
QAWDSSTAVV

SEQ ID NO: 5557 - protein, 10 aa, synthetic construct
QAWDSSTAVV

SEQ ID NO: 5558 - protein, 10 aa, synthetic construct
QAWDSSTAVV

SEQ ID NO: 5559 - protein, 11 aa, synthetic construct
QVWDSSSDHVV

SEQ ID NO: 5560 - protein, 9 aa, synthetic construct
QQSYSTPLT

SEQ ID NO: 5561 - protein, 9 aa, synthetic construct
QQSYSTPLT

SEQ ID NO: 5562 - protein, 9 aa, synthetic construct
QQSYSTPLT

SEQ ID NO: 5563 - protein, 10 aa, synthetic construct
SSYAGRNNLV

SEQ ID NO: 5564 - protein, 9 aa, synthetic construct
QQSYSTPLT

SEQ ID NO: 5565 - protein, 9 aa, synthetic construct
QQSYSSPLT

SEQ ID NO: 5566 - protein, 11 aa, synthetic construct
YSTDSSGNHRV

SEQ ID NO: 5567 - protein, 11 aa, synthetic construct
YSTDSSGNHRV

SEQ ID NO: 5568 - protein, 9 aa, synthetic construct
QQRSNWPLT

SEQ ID NO: 5569 - protein, 8 aa, synthetic construct
CSYEGSWV

SEQ ID NO: 5570 - protein, 9 aa, synthetic construct
QQYGSSPLT

SEQ ID NO: 5571 - protein, 11 aa, synthetic construct
QSYDSSLSGSV

SEQ ID NO: 5572 - protein, 11 aa, synthetic construct
NSRDSSGNHVV

SEQ ID NO: 5573 - protein, 11 aa, synthetic construct
QSYDSSLSGWV

SEQ ID NO: 5574 - protein, 9 aa, synthetic construct
QQANIFPLT

SEQ ID NO: 5575 - protein, 9 aa, synthetic construct
QQANSFPLT

SEQ ID NO: 5576 - protein, 9 aa, synthetic construct
QQANSFPLT

SEQ ID NO: 5577 - protein, 9 aa, synthetic construct
QQANSFPLT

SEQ ID NO: 5578 - protein, 9 aa, synthetic construct
QQANSFPIT

SEQ ID NO: 5579 - protein, 9 aa, synthetic construct
QQANSFPPT

SEQ ID NO: 5580 - protein, 9 aa, synthetic construct
QQANSFPPT

SEQ ID NO: 5581 - protein, 9 aa, synthetic construct
QQANSFPPT

SEQ ID NO: 5582 - protein, 9 aa, synthetic construct
QQANGFPIT

SEQ ID NO: 5583 - protein, 9 aa, synthetic construct
QQANSFPLT

SEQ ID NO: 5584 - protein, 9 aa, synthetic construct
QQANIFPLT

SEQ ID NO: 5585 - protein, 9 aa, synthetic construct
QQANSFPLT

SEQ ID NO: 5586 - protein, 9 aa, synthetic construct
QQRSNWPLT

SEQ ID NO: 5587 - protein, 9 aa, synthetic construct
MQGTHWPFT

SEQ ID NO: 5588 - protein, 9 aa, synthetic construct
LQDYNYPYT

SEQ ID NO: 5589 - protein, 10 aa, synthetic construct
CSYAGSSTWV

SEQ ID NO: 5590 - protein, 9 aa, synthetic construct
QQAYSFPYT

SEQ ID NO: 5591 - protein, 11 aa, synthetic construct
YSTDSSGNHYV

SEQ ID NO: 5592 - protein, 9 aa, synthetic construct
QQRSNWPFT

SEQ ID NO: 5593 - protein, 9 aa, synthetic construct
QQRSNWPFT

SEQ ID NO: 5594 - protein, 11 aa, synthetic construct
AAWDDSLNGWV

SEQ ID NO: 5595 - protein, 9 aa, synthetic construct
QQSYSTPFT

SEQ ID NO: 5596 - protein, 9 aa, synthetic construct
QQSYSTPLT

SEQ ID NO: 5597 - protein, 9 aa, synthetic construct
QQSYSTPLT

SEQ ID NO: 5598 - protein, 11 aa, synthetic construct
NSRDSSGNHVV

SEQ ID NO: 5599 - protein, 11 aa, synthetic construct
NSRDSSGNHVV

SEQ ID NO: 5600 - protein, 11 aa, synthetic construct
NSRDSSGNHLV

SEQ ID NO: 5601 - protein, 11 aa, synthetic construct
NSRDSSGNHVV

SEQ ID NO: 5602 - protein, 9 aa, synthetic construct
QQSYSTPLT

SEQ ID NO: 5603 - protein, 9 aa, synthetic construct
QAWDSSTVV

SEQ ID NO: 5604 - protein, 9 aa, synthetic construct
QQSYSTPIT

SEQ ID NO: 5605 - protein, 9 aa, synthetic construct
LQDSNYPLT

SEQ ID NO: 5606 - protein, 9 aa, synthetic construct
QQTDSSPWT

SEQ ID NO: 5607 - protein, 9 aa, synthetic construct
QQSYSTPFT

SEQ ID NO: 5608 - protein, 10 aa, synthetic construct
CSYAGSYTWV

SEQ ID NO: 5609 - protein, 9 aa, synthetic construct
QQSYSTPLT

SEQ ID NO: 5610 - protein, 9 aa, synthetic construct
MQGTHWPYT

SEQ ID NO: 5611 - protein, 9 aa, synthetic construct
QQSYSTPFT

SEQ ID NO: 5612 - protein, 9 aa, synthetic construct
QQSFSTPFT

SEQ ID NO: 5613 - protein, 9 aa, synthetic construct
QQSYSTPFT

SEQ ID NO: 5614 - protein, 9 aa, synthetic construct
QQSYSTPFT

SEQ ID NO: 5615 - protein, 10 aa, synthetic construct
SSYTSSSTWV

SEQ ID NO: 5616 - protein, 471 aa, synthetic construct
MGWSCIILFLVATATGVHSQVQLQQSGPGLVKPSQTLSLTCAISGDSVSSNSAAWNWIRQSPSRGLEWLGRTYYRSKWYNDYAVSVKSRITINPDTSKNQFSLQLNSVTPEDTAVYYCARKGELLGAFDIWGQGTMVTVSSASTKGPSVFPLAPSSKSTSGGTAALGCLVKDYFPEPVTVSWNSGALTSGVHTFPAVLQSSGLYSLSSVVTVPSSSLGTQTYICNVNHKPSNTKVDKKVEPKSCDKTHTCPPCPAPEAAGGPSVFLFPPKPKDTLMISRTPEVTCVVVDVSHEDPEVKFNWYVDGVEVHNAKTKPREEQYNSTYRVVSVLTVLHQDWLNGKEYKCKVSNKALGAPIEKTISKAKGQPREPQVYTLPPSREEMTKNQVSLTCLVKGFYPSDIAVEWESNGQPENNYKTTPPVLDSDGSFFLYSKLTVDKSRWQQGNVFSCSVMHEALHNHYTQKSLSLSPGK

SEQ ID NO: 5617 - protein, 471 aa, synthetic construct
MGWSCIILFLVATATGVHSQVQLQQSGPGLVKPSQTLSLTCAISGDSVSSNSAAWNWIRQSPSRGLEWLGRTYYRSKWYNDYAGSVKSRIIIIPDTSKNQLSLQLKSVTPEDTAVYYCARKWELRDAFDIWGQGTMVTVSSASTKGPSVFPLAPSSKSTSGGTAALGCLVKDYFPEPVTVSWNSGALTSGVHTFPAVLQSSGLYSLSSVVTVPSSSLGTQTYICNVNHKPSNTKVDKKVEPKSCDKTHTCPPCPAPEAAGGPSVFLFPPKPKDTLMISRTPEVTCVVVDVSHEDPEVKFNWYVDGVEVHNAKTKPREEQYNSTYRVVSVLTVLHQDWLNGKEYKCKVSNKALGAPIEKTISKAKGQPREPQVYTLPPSREEMTKNQVSLTCLVKGFYPSDIAVEWESNGQPENNYKTTPPVLDSDGSFFLYSKLTVDKSRWQQGNVFSCSVMHEALHNHYTQKSLSLSPGK

SEQ ID NO: 5618 - protein, 469 aa, synthetic construct
MGWSCIILFLVATATGVHSEVQLVESGGSVVRPGGSLRLSCAASGFTFDDYGMSWVRQAPGKGLEWVSGINWNGGSTGYADSVKGRFTISRDNAKNSLYLQMNSLRAEDTALYYCAREDYGDPGWFDPWGQGTLVTVSSASTKGPSVFPLAPSSKSTSGGTAALGCLVKDYFPEPVTVSWNSGALTSGVHTFPAVLQSSGLYSLSSVVTVPSSSLGTQTYICNVNHKPSNTKVDKKVEPKSCDKTHTCPPCPAPEAAGGPSVFLFPPKPKDTLMISRTPEVTCVVVDVSHEDPEVKFNWYVDGVEVHNAKTKPREEQYNSTYRVVSVLTVLHQDWLNGKEYKCKVSNKALGAPIEKTISKAKGQPREPQVYTLPPSREEMTKNQVSLTCLVKGFYPSDIAVEWESNGQPENNYKTTPPVLDSDGSFFLYSKLTVDKSRWQQGNVFSCSVMHEALHNHYTQKSLSLSPGK

SEQ ID NO: 5619 - protein, 466 aa, synthetic construct
MGWSCIILFLVATATGVHSQLQLQESGPGLVKPSETLSLTCTVSGGSISSSSYYWGWIRQPPGKGLEWIGSIYYSGSTYYNPSLKSRVTISVDTSKNQFSLKLSSVTAADTAVYYCATLTGDGDYWGQGTLVTVSSASTKGPSVFPLAPSSKSTSGGTAALGCLVKDYFPEPVTVSWNSGALTSGVHTFPAVLQSSGLYSLSSVVTVPSSSLGTQTYICNVNHKPSNTKVDKKVEPKSCDKTHTCPPCPAPEAAGGPSVFLFPPKPKDTLMISRTPEVTCVVVDVSHEDPEVKFNWYVDGVEVHNAKTKPREEQYNSTYRVVSVLTVLHQDWLNGKEYKCKVSNKALGAPIEKTISKAKGQPREPQVYTLPPSREEMTKNQVSLTCLVKGFYPSDIAVEWESNGQPENNYKTTPPVLDSDGSFFLYSKLTVDKSRWQQGNVFSCSVMHEALHNHYTQKSLSLSPGK

SEQ ID NO: 5620 - protein, 469 aa, synthetic construct
MGWSCIILFLVATATGVHSEVQLVESGGGLVKPGGSLRLSCAASGFTFSSYSMNWVRQAPGKGLEWVSSISSSSSYIYYADSVKGRFTISRDNAKNSLYLQMNSLRAEDTAVYYCARDRSSSWYSFDYWGQGTLVTVSSASTKGPSVFPLAPSSKSTSGGTAALGCLVKDYFPEPVTVSWNSGALTSGVHTFPAVLQSSGLYSLSSVVTVPSSSLGTQTYICNVNHKPSNTKVDKKVEPKSCDKTHTCPPCPAPEAAGGPSVFLFPPKPKDTLMISRTPEVTCVVVDVSHEDPEVKFNWYVDGVEVHNAKTKPREEQYNSTYRVVSVLTVLHQDWLNGKEYKCKVSNKALGAPIEKTISKAKGQPREPQVYTLPPSREEMTKNQVSLTCLVKGFYPSDIAVEWESNGQPENNYKTTPPVLDSDGSFFLYSKLTVDKSRWQQGNVFSCSVMHEALHNHYTQKSLSLSPGK

SEQ ID NO: 5621 - protein, 470 aa, synthetic construct
MGWSCIILFLVATATGVHSEVQLVESGGGLVTPGGSLRLSCAASGFTFNNYSMNWVRQAPGKGLEWVSSISSSSSYIYYADSVKGRFTISRDNAKNSLYLPMISLRAEDTAVYYCARDGITGTTFYFDYWGQGTLVTVSSASTKGPSVFPLAPSSKSTSGGTAALGCLVKDYFPEPVTVSWNSGALTSGVHTFPAVLQSSGLYSLSSVVTVPSSSLGTQTYICNVNHKPSNTKVDKKVEPKSCDKTHTCPPCPAPEAAGGPSVFLFPPKPKDTLMISRTPEVTCVVVDVSHEDPEVKFNWYVDGVEVHNAKTKPREEQYNSTYRVVSVLTVLHQDWLNGKEYKCKVSNKALGAPIEKTISKAKGQPREPQVYTLPPSREEMTKNQVSLTCLVKGFYPSDIAVEWESNGQPENNYKTTPPVLDSDGSFFLYSKLTVDKSRWQQGNVFSCSVMHEALHNHYTQKSLSLSPGK

SEQ ID NO: 5622 - protein, 466 aa, synthetic construct
MGWSCIILFLVATATGVHSQVQLVESGGGVVQPGRSLRLSCAASGFTFSSYGMHWVRQAPGKGLEWVAVIWYDGSNKYYADSVKGRFTISRDNSKNTLYLQMNSLRAEDTAVYYCASIAAAGRDYWGQGTLVTVSSASTKGPSVFPLAPSSKSTSGGTAALGCLVKDYFPEPVTVSWNSGALTSGVHTFPAVLQSSGLYSLSSVVTVPSSSLGTQTYICNVNHKPSNTKVDKKVEPKSCDKTHTCPPCPAPEAAGGPSVFLFPPKPKDTLMISRTPEVTCVVVDVSHEDPEVKFNWYVDGVEVHNAKTKPREEQYNSTYRVVSVLTVLHQDWLNGKEYKCKVSNKALGAPIEKTISKAKGQPREPQVYTLPPSREEMTKNQVSLTCLVKGFYPSDIAVEWESNGQPENNYKTTPPVLDSDGSFFLYSKLTVDKSRWQQGNVFSCSVMHEALHNHYTQKSLSLSPGK

SEQ ID NO: 5623 - protein, 466 aa, synthetic construct
MGWSCIILFLVATATGVHSEVQLVESGGGLVQPGGSLRLSCAASGFTFSSYAMSWVRQAPGKGLEWVSAISGSGGSTYYADSVKGRFTISRDNSKNTLYLQMNSLRAEDTAVYYCAKAPELRFDYWGQGTLVTVSSASTKGPSVFPLAPSSKSTSGGTAALGCLVKDYFPEPVTVSWNSGALTSGVHTFPAVLQSSGLYSLSSVVTVPSSSLGTQTYICNVNHKPSNTKVDKKVEPKSCDKTHTCPPCPAPEAAGGPSVFLFPPKPKDTLMISRTPEVTCVVVDVSHEDPEVKFNWYVDGVEVHNAKTKPREEQYNSTYRVVSVLTVLHQDWLNGKEYKCKVSNKALGAPIEKTISKAKGQPREPQVYTLPPSREEMTKNQVSLTCLVKGFYPSDIAVEWESNGQPENNYKTTPPVLDSDGSFFLYSKLTVDKSRWQQGNVFSCSVMHEALHNHYTQKSLSLSPGK

SEQ ID NO: 5624 - protein, 466 aa, synthetic construct
MGWSCIILFLVATATGVHSQVQLVQSGAEVKKPGASVKVSCKASGYTFTSYGISWVRQAPGQGLEWMGWISPYNGNTNYAQNLQDRVTMITDTSTTTAYMELRSLRSDDTAVYYCARNHYYYMDVWGKGTTVTVSSASTKGPSVFPLAPSSKSTSGGTAALGCLVKDYFPEPVTVSWNSGALTSGVHTFPAVLQSSGLYSLSSVVTVPSSSLGTQTYICNVNHKPSNTKVDKKVEPKSCDKTHTCPPCPAPEAAGGPSVFLFPPKPKDTLMISRTPEVTCVVVDVSHEDPEVKFNWYVDGVEVHNAKTKPREEQYNSTYRVVSVLTVLHQDWLNGKEYKCKVSNKALGAPIEKTISKAKGQPREPQVYTLPPSREEMTKNQVSLTCLVKGFYPSDIAVEWESNGQPENNYKTTPPVLDSDGSFFLYSKLTVDKSRWQQGNVFSCSVMHEALHNHYTQKSLSLSPGK

SEQ ID NO: 5625 - protein, 469 aa, synthetic construct
MGWSCIILFLVATATGVHSQVQLQQWGAGLLKPSETLSLTCAVYGGSFSGYYWSWIRQPPGKGLEWIGEINHSGSTNYNPSLKSRVTISVDTSKNQFSLKLSSVTAADTAVYYCARGELGIGYWYFDLWGRGTLVTVSSASTKGPSVFPLAPSSKSTSGGTAALGCLVKDYFPEPVTVSWNSGALTSGVHTFPAVLQSSGLYSLSSVVTVPSSSLGTQTYICNVNHKPSNTKVDKKVEPKSCDKTHTCPPCPAPEAAGGPSVFLFPPKPKDTLMISRTPEVTCVVVDVSHEDPEVKFNWYVDGVEVHNAKTKPREEQYNSTYRVVSVLTVLHQDWLNGKEYKCKVSNKALGAPIEKTISKAKGQPREPQVYTLPPSREEMTKNQVSLTCLVKGFYPSDIAVEWESNGQPENNYKTTPPVLDSDGSFFLYSKLTVDKSRWQQGNVFSCSVMHEALHNHYTQKSLSLSPGK

SEQ ID NO: 5626 - protein, 471 aa, synthetic construct
MGWSCIILFLVATATGVHSQVQLVESGGGVVQPGRSLRLSCAASGFTFSSYGMHWVRQAPGKGLEWVAVIWYDGSNKYYADSVKGRFTISRDNSKNTLYLQMNSLRAEDTAVYYCARDTGITMVRGVFDYWGQGTLVTVSSASTKGPSVFPLAPSSKSTSGGTAALGCLVKDYFPEPVTVSWNSGALTSGVHTFPAVLQSSGLYSLSSVVTVPSSSLGTQTYICNVNHKPSNTKVDKKVEPKSCDKTHTCPPCPAPEAAGGPSVFLFPPKPKDTLMISRTPEVTCVVVDVSHEDPEVKFNWYVDGVEVHNAKTKPREEQYNSTYRVVSVLTVLHQDWLNGKEYKCKVSNKALGAPIEKTISKAKGQPREPQVYTLPPSREEMTKNQVSLTCLVKGFYPSDIAVEWESNGQPENNYKTTPPVLDSDGSFFLYSKLTVDKSRWQQGNVFSCSVMHEALHNHYTQKSLSLSPGK

SEQ ID NO: 5627 - protein, 471 aa, synthetic construct
MGWSCIILFLVATATGVHSEVQLVESGGDLVQPGGSLKLSCAASGFSFSGSTLHWVRQASGKGLEWIGHIRSKPNNYATLYGASVKGRFTISRDDSKNTAYLQMNSLKIEDTAVYYCNGVYGGSSYFFDYWGQGTLVTVSSASTKGPSVFPLAPSSKSTSGGTAALGCLVKDYFPEPVTVSWNSGALTSGVHTFPAVLQSSGLYSLSSVVTVPSSSLGTQTYICNVNHKPSNTKVDKKVEPKSCDKTHTCPPCPAPEAAGGPSVFLFPPKPKDTLMISRTPEVTCVVVDVSHEDPEVKFNWYVDGVEVHNAKTKPREEQYNSTYRVVSVLTVLHQDWLNGKEYKCKVSNKALGAPIEKTISKAKGQPREPQVYTLPPSREEMTKNQVSLTCLVKGFYPSDIAVEWESNGQPENNYKTTPPVLDSDGSFFLYSKLTVDKSRWQQGNVFSCSVMHEALHNHYTQKSLSLSPGK

SEQ ID NO: 5628 - protein, 466 aa, synthetic construct
MGWSCIILFLVATATGVHSQVQLVQSGAEVKKPGASVKVSCKASGYTFTGYYMHWVRQAPGQGLEWMGWINPNSGGTNYAQKFQGRVTMTRDTSISTAYMELSRLRSDDTAVYYCARDETTIFDYWGQGTLVTVSSASTKGPSVFPLAPSSKSTSGGTAALGCLVKDYFPEPVTVSWNSGALTSGVHTFPAVLQSSGLYSLSSVVTVPSSSLGTQTYICNVNHKPSNTKVDKKVEPKSCDKTHTCPPCPAPEAAGGPSVFLFPPKPKDTLMISRTPEVTCVVVDVSHEDPEVKFNWYVDGVEVHNAKTKPREEQYNSTYRVVSVLTVLHQDWLNGKEYKCKVSNKALGAPIEKTISKAKGQPREPQVYTLPPSREEMTKNQVSLTCLVKGFYPSDIAVEWESNGQPENNYKTTPPVLDSDGSFFLYSKLTVDKSRWQQGNVFSCSVMHEALHNHYTQKSLSLSPGK

SEQ ID NO: 5629 - protein, 478 aa, synthetic construct
MGWSCIILFLVATATGVHSQVQLVQSGAEVTKPGASVKVSCKASGYTFINYGISWVRQAPGQGLEWMGWISAYSGNRNYAQKFQDRVIMTTDTFTNTAYMELRSLRSDDTAVYYCARLGCNGTSCYTSWYYHFYMDVWGKGTTVTVSSASTKGPSVFPLAPSSKSTSGGTAALGCLVKDYFPEPVTVSWNSGALTSGVHTFPAVLQSSGLYSLSSVVTVPSSSLGTQTYICNVNHKPSNTKVDKKVEPKSCDKTHTCPPCPAPEAAGGPSVFLFPPKPKDTLMISRTPEVTCVVVDVSHEDPEVKFNWYVDGVEVHNAKTKPREEQYNSTYRVVSVLTVLHQDWLNGKEYKCKVSNKALGAPIEKTISKAKGQPREPQVYTLPPSREEMTKNQVSLTCLVKGFYPSDIAVEWESNGQPENNYKTTPPVLDSDGSFFLYSKLTVDKSRWQQGNVFSCSVMHEALHNHYTQKSLSLSPGK

SEQ ID NO: 5630 - protein, 472 aa, synthetic construct
MGWSCIILFLVATATGVHSQVQLVESGGGVVQPGRSLRLSCAASGFTFSSYGMHWVRQAPGKGLEWVAVIWYDGSNKYYADSVKGRFTISRDNSKNTLYLQMNSLRAEDTAVYYCARDEDYYGSGSYSFDYWGQGTLVTVSSASTKGPSVFPLAPSSKSTSGGTAALGCLVKDYFPEPVTVSWNSGALTSGVHTFPAVLQSSGLYSLSSVVTVPSSSLGTQTYICNVNHKPSNTKVDKKVEPKSCDKTHTCPPCPAPEAAGGPSVFLFPPKPKDTLMISRTPEVTCVVVDVSHEDPEVKFNWYVDGVEVHNAKTKPREEQYNSTYRVVSVLTVLHQDWLNGKEYKCKVSNKALGAPIEKTISKAKGQPREPQVYTLPPSREEMTKNQVSLTCLVKGFYPSDIAVEWESNGQPENNYKTTPPVLDSDGSFFLYSKLTVDKSRWQQGNVFSCSVMHEALHNHYTQKSLSLSPGK

SEQ ID NO: 5631 - protein, 467 aa, synthetic construct
MGWSCIILFLVATATGVHSQVQLQESGPGLVKPSGTLSLTCAVSGGSISSSNWWSWVRQPPGKGLEWIGEIYHSGSTNYNPSLKSRVTISVDKSKNQFSLKLSSVTAADTAVYYCARRGAARPFDYWGQGTLVTVSSASTKGPSVFPLAPSSKSTSGGTAALGCLVKDYFPEPVTVSWNSGALTSGVHTFPAVLQSSGLYSLSSVVTVPSSSLGTQTYICNVNHKPSNTKVDKKVEPKSCDKTHTCPPCPAPEAAGGPSVFLFPPKPKDTLMISRTPEVTCVVVDVSHEDPEVKFNWYVDGVEVHNAKTKPREEQYNSTYRVVSVLTVLHQDWLNGKEYKCKVSNKALGAPIEKTISKAKGQPREPQVYTLPPSREEMTKNQVSLTCLVKGFYPSDIAVEWESNGQPENNYKTTPPVLDSDGSFFLYSKLTVDKSRWQQGNVFSCSVMHEALHNHYTQKSLSLSPGK

SEQ ID NO: 5632 - protein, 469 aa, synthetic construct
MGWSCIILFLVATATGVHSQITLKESGPTLVKPTQTLTLTCTFSGFSLSTSGVGVGWIRQPPGKALEWLALIYWNDDKRYSPSLKSRLTITKDTSKNQVVLTMTNMDPVDTATYYCAHSNWNYGYFDLWGRGTLVTVSSASTKGPSVFPLAPSSKSTSGGTAALGCLVKDYFPEPVTVSWNSGALTSGVHTFPAVLQSSGLYSLSSVVTVPSSSLGTQTYICNVNHKPSNTKVDKKVEPKSCDKTHTCPPCPAPEAAGGPSVFLFPPKPKDTLMISRTPEVTCVVVDVSHEDPEVKFNWYVDGVEVHNAKTKPREEQYNSTYRVVSVLTVLHQDWLNGKEYKCKVSNKALGAPIEKTISKAKGQPREPQVYTLPPSREEMTKNQVSLTCLVKGFYPSDIAVEWESNGQPENNYKTTPPVLDSDGSFFLYSKLTVDKSRWQQGNVFSCSVMHEALHNHYTQKSLSLSPGK

SEQ ID NO: 5633 - protein, 468 aa, synthetic construct
MGWSCIILFLVATATGVHSEVQLVESGGGLVQPGGSLRLSCAASGFTFSSYAMSWVRQAPGKGLEWVSAISGSGGSTYYADSVKGRFTISRDNSKNTLYLQMNSLRAEDTAVYYCAKKDIVATHFDYWGQGTLVTVSSASTKGPSVFPLAPSSKSTSGGTAALGCLVKDYFPEPVTVSWNSGALTSGVHTFPAVLQSSGLYSLSSVVTVPSSSLGTQTYICNVNHKPSNTKVDKKVEPKSCDKTHTCPPCPAPEAAGGPSVFLFPPKPKDTLMISRTPEVTCVVVDVSHEDPEVKFNWYVDGVEVHNAKTKPREEQYNSTYRVVSVLTVLHQDWLNGKEYKCKVSNKALGAPIEKTISKAKGQPREPQVYTLPPSREEMTKNQVSLTCLVKGFYPSDIAVEWESNGQPENNYKTTPPVLDSDGSFFLYSKLTVDKSRWQQGNVFSCSVMHEALHNHYTQKSLSLSPGK

SEQ ID NO: 5634 - protein, 473 aa, synthetic construct
MGWSCIILFLVATATGVHSEVQLVESGGGLVKPGGSLRLSCAASGFTFSNAWMSWVRQAPGKGLEWVGRIKSKTDGGTTDYAAPVKGRFTISRDDSKNTLYLQMNSLKTEDTAVYYCTTADYDFWSGYYMDVWGKGTTVTVSSASTKGPSVFPLAPSSKSTSGGTAALGCLVKDYFPEPVTVSWNSGALTSGVHTFPAVLQSSGLYSLSSVVTVPSSSLGTQTYICNVNHKPSNTKVDKKVEPKSCDKTHTCPPCPAPEAAGGPSVFLFPPKPKDTLMISRTPEVTCVVVDVSHEDPEVKFNWYVDGVEVHNAKTKPREEQYNSTYRVVSVLTVLHQDWLNGKEYKCKVSNKALGAPIEKTISKAKGQPREPQVYTLPPSREEMTKNQVSLTCLVKGFYPSDIAVEWESNGQPENNYKTTPPVLDSDGSFFLYSKLTVDKSRWQQGNVFSCSVMHEALHNHYTQKSLSLSPGK

SEQ ID NO: 5635 - protein, 465 aa, synthetic construct
MGWSCIILFLVATATGVHSEVQLVESGGGLVQPGGSLRLSCAASGFTFSSYSMNWVRQAPGKGLEWVSYISSSSSTIYYADSVKGRFTISRDNAKNSLYLQMNSLRDEDTAVYYCARDRYNFDYWGQGTLVTVSSASTKGPSVFPLAPSSKSTSGGTAALGCLVKDYFPEPVTVSWNSGALTSGVHTFPAVLQSSGLYSLSSVVTVPSSSLGTQTYICNVNHKPSNTKVDKKVEPKSCDKTHTCPPCPAPEAAGGPSVFLFPPKPKDTLMISRTPEVTCVVVDVSHEDPEVKFNWYVDGVEVHNAKTKPREEQYNSTYRVVSVLTVLHQDWLNGKEYKCKVSNKALGAPIEKTISKAKGQPREPQVYTLPPSREEMTKNQVSLTCLVKGFYPSDIAVEWESNGQPENNYKTTPPVLDSDGSFFLYSKLTVDKSRWQQGNVFSCSVMHEALHNHYTQKSLSLSPGK

SEQ ID NO: 5636 - protein, 470 aa, synthetic construct
MGWSCIILFLVATATGVHSEVQLVESGGGVVRPGGSLRLSCAASGFTFDDYGMSWVRQAPGKGLEWVSGINWNGGSTGYADSVKGRFTISRDNAKNSLYLQMNSLRAEDTALYYCARGGDTAMVTVFDYWGQGTLVTVSSASTKGPSVFPLAPSSKSTSGGTAALGCLVKDYFPEPVTVSWNSGALTSGVHTFPAVLQSSGLYSLSSVVTVPSSSLGTQTYICNVNHKPSNTKVDKKVEPKSCDKTHTCPPCPAPEAAGGPSVFLFPPKPKDTLMISRTPEVTCVVVDVSHEDPEVKFNWYVDGVEVHNAKTKPREEQYNSTYRVVSVLTVLHQDWLNGKEYKCKVSNKALGAPIEKTISKAKGQPREPQVYTLPPSREEMTKNQVSLTCLVKGFYPSDIAVEWESNGQPENNYKTTPPVLDSDGSFFLYSKLTVDKSRWQQGNVFSCSVMHEALHNHYTQKSLSLSPGK

SEQ ID NO: 5637 - protein, 467 aa, synthetic construct
MGWSCIILFLVATATGVHSEVQLVQSGAEVKKPGESLKISCKGSGYSFTSYWIGWVRQMSGKGLEWMGIIYPSDSDTRYSPSFQGQVTISADKSISTAYLQWSSLKASDTAMYYCARQINWGAIDYWGQGTLVTVSSASTKGPSVFPLAPSSKSTSGGTAALGCLVKDYFPEPVTVSWNSGALTSGVHTFPAVLQSSGLYSLSSVVTVPSSSLGTQTYICNVNHKPSNTKVDKKVEPKSCDKTHTCPPCPAPEAAGGPSVFLFPPKPKDTLMISRTPEVTCVVVDVSHEDPEVKFNWYVDGVEVHNAKTKPREEQYNSTYRVVSVLTVLHQDWLNGKEYKCKVSNKALGAPIEKTISKAKGQPREPQVYTLPPSREEMTKNQVSLTCLVKGFYPSDIAVEWESNGQPENNYKTTPPVLDSDGSFFLYSKLTVDKSRWQQGNVFSCSVMHEALHNHYTQKSLSLSPGK

SEQ ID NO: 5638 - protein, 468 aa, synthetic construct
MGWSCIILFLVATATGVHSQVQLVQSGAEVKKPGASVKVSCKASGYTFTSYGISWVRQAPGQGLEWMGWISVYNGNTNYAQKLQGRVTMTTDTSTSTAYMELRSLRSDDTAVYYCARQITATRGFDYWGQGTLVTVSSASTKGPSVFPLAPSSKSTSGGTAALGCLVKDYFPEPVTVSWNSGALTSGVHTFPAVLQSSGLYSLSSVVTVPSSSLGTQTYICNVNHKPSNTKVDKKVEPKSCDKTHTCPPCPAPEAAGGPSVFLFPPKPKDTLMISRTPEVTCVVVDVSHEDPEVKFNWYVDGVEVHNAKTKPREEQYNSTYRVVSVLTVLHQDWLNGKEYKCKVSNKALGAPIEKTISKAKGQPREPQVYTLPPSREEMTKNQVSLTCLVKGFYPSDIAVEWESNGQPENNYKTTPPVLDSDGSFFLYSKLTVDKSRWQQGNVFSCSVMHEALHNHYTQKSLSLSPGK

SEQ ID NO: 5639 - protein, 471 aa, synthetic construct
MGWSCIILFLVATATGVHSQVQLQQSGPGLVKPSQTLSLTCAISGDSVSSNSAAWSWIRQSPSRGLEWLGRTYYRSKWYNDYAVSVKSRITINPDTSKNQFSLQLNSVTPEDTAVYYCARKWELRDTFDIWGQGTMVTVSSASTKGPSVFPLAPSSKSTSGGTAALGCLVKDYFPEPVTVSWNSGALTSGVHTFPAVLQSSGLYSLSSVVTVPSSSLGTQTYICNVNHKPSNTKVDKKVEPKSCDKTHTCPPCPAPEAAGGPSVFLFPPKPKDTLMISRTPEVTCVVVDVSHEDPEVKFNWYVDGVEVHNAKTKPREEQYNSTYRVVSVLTVLHQDWLNGKEYKCKVSNKALGAPIEKTISKAKGQPREPQVYTLPPSREEMTKNQVSLTCLVKGFYPSDIAVEWESNGQPENNYKTTPPVLDSDGSFFLYSKLTVDKSRWQQGNVFSCSVMHEALHNHYTQKSLSLSPGK

SEQ ID NO: 5640 - protein, 464 aa, synthetic construct
MGWSCIILFLVATATGVHSQVQLQQWGAGLLKPSETLSLTCAVYGGSFSGYYWSWIRQPPGKGLEWIGEINHSGSTNYNPSLKSRVTISVDTSKNQFSLKLSSVTAADTAVYYCASYGDFFDYWGQGTLVTVSSASTKGPSVFPLAPSSKSTSGGTAALGCLVKDYFPEPVTVSWNSGALTSGVHTFPAVLQSSGLYSLSSVVTVPSSSLGTQTYICNVNHKPSNTKVDKKVEPKSCDKTHTCPPCPAPEAAGGPSVFLFPPKPKDTLMISRTPEVTCVVVDVSHEDPEVKFNWYVDGVEVHNAKTKPREEQYNSTYRVVSVLTVLHQDWLNGKEYKCKVSNKALGAPIEKTISKAKGQPREPQVYTLPPSREEMTKNQVSLTCLVKGFYPSDIAVEWESNGQPENNYKTTPPVLDSDGSFFLYSKLTVDKSRWQQGNVFSCSVMHEALHNHYTQKSLSLSPGK

SEQ ID NO: 5641 - protein, 467 aa, synthetic construct
MGWSCIILFLVATATGVHSEVQLVESGGGLVKPGGSLRLSCAASGFTFSSYSMNWVRQAPGKGLEWVSSISSSSSYIYYADSVKGRFTISRDNAKNSLYLQMNSLRAEDTAVYYCARETELTVMDVWGKGTTVTVSSASTKGPSVFPLAPSSKSTSGGTAALGCLVKDYFPEPVTVSWNSGALTSGVHTFPAVLQSSGLYSLSSVVTVPSSSLGTQTYICNVNHKPSNTKVDKKVEPKSCDKTHTCPPCPAPEAAGGPSVFLFPPKPKDTLMISRTPEVTCVVVDVSHEDPEVKFNWYVDGVEVHNAKTKPREEQYNSTYRVVSVLTVLHQDWLNGKEYKCKVSNKALGAPIEKTISKAKGQPREPQVYTLPPSREEMTKNQVSLTCLVKGFYPSDIAVEWESNGQPENNYKTTPPVLDSDGSFFLYSKLTVDKSRWQQGNVFSCSVMHEALHNHYTQKSLSLSPGK

SEQ ID NO: 5642 - protein, 478 aa, synthetic construct
MGWSCIILFLVATATGVHSEVQLVESGGGLVKPGGSLRLSCAASGFTFSNAWMSWVRQAPGKGLEWVGRIKSKTDGGTTDYAAPVKGRFTISRDDSKNTLYLQMNSLKTEDTAVYYCTTDWEYYDFWSGYYSPYFDYWGQGTLVTVSSASTKGPSVFPLAPSSKSTSGGTAALGCLVKDYFPEPVTVSWNSGALTSGVHTFPAVLQSSGLYSLSSVVTVPSSSLGTQTYICNVNHKPSNTKVDKKVEPKSCDKTHTCPPCPAPEAAGGPSVFLFPPKPKDTLMISRTPEVTCVVVDVSHEDPEVKFNWYVDGVEVHNAKTKPREEQYNSTYRVVSVLTVLHQDWLNGKEYKCKVSNKALGAPIEKTISKAKGQPREPQVYTLPPSREEMTKNQVSLTCLVKGFYPSDIAVEWESNGQPENNYKTTPPVLDSDGSFFLYSKLTVDKSRWQQGNVFSCSVMHEALHNHYTQKSLSLSPGK

SEQ ID NO: 5643 - protein, 463 aa, synthetic construct
MGWSCIILFLVATATGVHSQVQLQESGPGLVKPSQTLSLTCTVSGGSISSGGYYWSWIRQHPGKGLEWIGYIYYIGITYYNPSLKSRVTISVDTSKNQFSLKLSSVTAADTAVYYCARAFDYWGQGTLVTVSSASTKGPSVFPLAPSSKSTSGGTAALGCLVKDYFPEPVTVSWNSGALTSGVHTFPAVLQSSGLYSLSSVVTVPSSSLGTQTYICNVNHKPSNTKVDKKVEPKSCDKTHTCPPCPAPEAAGGPSVFLFPPKPKDTLMISRTPEVTCVVVDVSHEDPEVKFNWYVDGVEVHNAKTKPREEQYNSTYRVVSVLTVLHQDWLNGKEYKCKVSNKALGAPIEKTISKAKGQPREPQVYTLPPSREEMTKNQVSLTCLVKGFYPSDIAVEWESNGQPENNYKTTPPVLDSDGSFFLYSKLTVDKSRWQQGNVFSCSVMHEALHNHYTQKSLSLSPGK

SEQ ID NO: 5644 - protein, 463 aa, synthetic construct
MGWSCIILFLVATATGVHSQVQLQESGPGLVKPSQTLSLTCTVSGGSISSGGYYWSWIRQHPGKGLEWIGYFYYSGSTYYNPSLKSRVSISVDTSKNQFSLRLSSVTVADTAVYYCVRAFDYWGQGTLVTVSSASTKGPSVFPLAPSSKSTSGGTAALGCLVKDYFPEPVTVSWNSGALTSGVHTFPAVLQSSGLYSLSSVVTVPSSSLGTQTYICNVNHKPSNTKVDKKVEPKSCDKTHTCPPCPAPEAAGGPSVFLFPPKPKDTLMISRTPEVTCVVVDVSHEDPEVKFNWYVDGVEVHNAKTKPREEQYNSTYRVVSVLTVLHQDWLNGKEYKCKVSNKALGAPIEKTISKAKGQPREPQVYTLPPSREEMTKNQVSLTCLVKGFYPSDIAVEWESNGQPENNYKTTPPVLDSDGSFFLYSKLTVDKSRWQQGNVFSCSVMHEALHNHYTQKSLSLSPGK

SEQ ID NO: 5645 - protein, 463 aa, synthetic construct
MGWSCIILFLVATATGVHSEVQLVESGGGLVKPGGSLRLSCAASGFTFSNAWMSWVRQAPGKGLEWVGRIKSKTDGGTTDYAAPVKGRFTISRDDSKNTLYLQMNSLKTEDTAVYYCTTGANWGQGTLVTVSSASTKGPSVFPLAPSSKSTSGGTAALGCLVKDYFPEPVTVSWNSGALTSGVHTFPAVLQSSGLYSLSSVVTVPSSSLGTQTYICNVNHKPSNTKVDKKVEPKSCDKTHTCPPCPAPEAAGGPSVFLFPPKPKDTLMISRTPEVTCVVVDVSHEDPEVKFNWYVDGVEVHNAKTKPREEQYNSTYRVVSVLTVLHQDWLNGKEYKCKVSNKALGAPIEKTISKAKGQPREPQVYTLPPSREEMTKNQVSLTCLVKGFYPSDIAVEWESNGQPENNYKTTPPVLDSDGSFFLYSKLTVDKSRWQQGNVFSCSVMHEALHNHYTQKSLSLSPGK

SEQ ID NO: 5646 - protein, 463 aa, synthetic construct
MGWSCIILFLVATATGVHSQVQLVQSGAEVKKPGASVKVSCKASGYTFTSYDINWVRQATGQGLEWMGWMNPNSGNTGYAQKFQGRVTMTRNTSISTAYMELSSLRSEDTAVYYCARVAFDIWGQGTMVTVSSASTKGPSVFPLAPSSKSTSGGTAALGCLVKDYFPEPVTVSWNSGALTSGVHTFPAVLQSSGLYSLSSVVTVPSSSLGTQTYICNVNHKPSNTKVDKKVEPKSCDKTHTCPPCPAPEAAGGPSVFLFPPKPKDTLMISRTPEVTCVVVDVSHEDPEVKFNWYVDGVEVHNAKTKPREEQYNSTYRVVSVLTVLHQDWLNGKEYKCKVSNKALGAPIEKTISKAKGQPREPQVYTLPPSREEMTKNQVSLTCLVKGFYPSDIAVEWESNGQPENNYKTTPPVLDSDGSFFLYSKLTVDKSRWQQGNVFSCSVMHEALHNHYTQKSLSLSPGK

SEQ ID NO: 5647 - protein, 463 aa, synthetic construct
MGWSCIILFLVATATGVHSQVQLVQSGAEAKKPGASVKVSCMASGYTFTTYGISWVRQAPGQGLEWMGWISAYNGNTKYAQKLQGRVTMTTDTSTRTAYMELRSLRSDDTAVYYCARQIGDYWGQGTLVTVSSASTKGPSVFPLAPSSKSTSGGTAALGCLVKDYFPEPVTVSWNSGALTSGVHTFPAVLQSSGLYSLSSVVTVPSSSLGTQTYICNVNHKPSNTKVDKKVEPKSCDKTHTCPPCPAPEAAGGPSVFLFPPKPKDTLMISRTPEVTCVVVDVSHEDPEVKFNWYVDGVEVHNAKTKPREEQYNSTYRVVSVLTVLHQDWLNGKEYKCKVSNKALGAPIEKTISKAKGQPREPQVYTLPPSREEMTKNQVSLTCLVKGFYPSDIAVEWESNGQPENNYKTTPPVLDSDGSFFLYSKLTVDKSRWQQGNVFSCSVMHEALHNHYTQKSLSLSPGK

SEQ ID NO: 5648 - protein, 463 aa, synthetic construct
MGWSCIILFLVATATGVHSEVQLVESGGGLVQPGGSLRLSCAASGFTFSSYAMSWVRQAPGKGLEWVSAISGSGGSTYYADSVKGRFTISRDNSKNTLYLQMNSLRAEDTAVYYCHQTGEDYWGQGTLVTVSSASTKGPSVFPLAPSSKSTSGGTAALGCLVKDYFPEPVTVSWNSGALTSGVHTFPAVLQSSGLYSLSSVVTVPSSSLGTQTYICNVNHKPSNTKVDKKVEPKSCDKTHTCPPCPAPEAAGGPSVFLFPPKPKDTLMISRTPEVTCVVVDVSHEDPEVKFNWYVDGVEVHNAKTKPREEQYNSTYRVVSVLTVLHQDWLNGKEYKCKVSNKALGAPIEKTISKAKGQPREPQVYTLPPSREEMTKNQVSLTCLVKGFYPSDIAVEWESNGQPENNYKTTPPVLDSDGSFFLYSKLTVDKSRWQQGNVFSCSVMHEALHNHYTQKSLSLSPGK

SEQ ID NO: 5649 - protein, 464 aa, synthetic construct
MGWSCIILFLVATATGVHSEVQLVESGGGLVKPGGSLRLSCAASGFTFSNAWMSWVRQAPGKGLEWVGRIKSKSDGGTRDYAAPVKGRFTISRDDSKNTLYLQMNSLKTEDTAMFYCTTGGTHWGQGTLVTVSSASTKGPSVFPLAPSSKSTSGGTAALGCLVKDYFPEPVTVSWNSGALTSGVHTFPAVLQSSGLYSLSSVVTVPSSSLGTQTYICNVNHKPSNTKVDKKVEPKSCDKTHTCPPCPAPEAAGGPSVFLFPPKPKDTLMISRTPEVTCVVVDVSHEDPEVKFNWYVDGVEVHNAKTKPREEQYNSTYRVVSVLTVLHQDWLNGKEYKCKVSNKALGAPIEKTISKAKGQPREPQVYTLPPSREEMTKNQVSLTCLVKGFYPSDIAVEWESNGQPENNYKTTPPVLDSDGSFFLYSKLTVDKSRWQQGNVFSCSVMHEALHNHYTQKSLSLSPGK

SEQ ID NO: 5650 - protein, 464 aa, synthetic construct
MGWSCIILFLVATATGVHSQVQLVQSGAEVKKPGASVKVSCKASGYTFTSYDINWVRQATGQGLEWMGWMNPNSGNTGYAQKFQGRVTMTRNTSISTAYMELSSLRSEDTAVYYCARRSFLDYWGQGTLVTVSSASTKGPSVFPLAPSSKSTSGGTAALGCLVKDYFPEPVTVSWNSGALTSGVHTFPAVLQSSGLYSLSSVVTVPSSSLGTQTYICNVNHKPSNTKVDKKVEPKSCDKTHTCPPCPAPEAAGGPSVFLFPPKPKDTLMISRTPEVTCVVVDVSHEDPEVKFNWYVDGVEVHNAKTKPREEQYNSTYRVVSVLTVLHQDWLNGKEYKCKVSNKALGAPIEKTISKAKGQPREPQVYTLPPSREEMTKNQVSLTCLVKGFYPSDIAVEWESNGQPENNYKTTPPVLDSDGSFFLYSKLTVDKSRWQQGNVFSCSVMHEALHNHYTQKSLSLSPGK

SEQ ID NO: 5651 - protein, 464 aa, synthetic construct
MGWSCIILFLVATATGVHSEVQLVESGGGLVKPGGSLRLSCAASGFTFSNAWMSWVRQAPGKGLEWVGRIKSKTDGGTTDYATPVKGRFTISRADSKNTLFLQMSSLKTEDTAVYFCTTGGTNWGQGTLVTVSSASTKGPSVFPLAPSSKSTSGGTAALGCLVKDYFPEPVTVSWNSGALTSGVHTFPAVLQSSGLYSLSSVVTVPSSSLGTQTYICNVNHKPSNTKVDKKVEPKSCDKTHTCPPCPAPEAAGGPSVFLFPPKPKDTLMISRTPEVTCVVVDVSHEDPEVKFNWYVDGVEVHNAKTKPREEQYNSTYRVVSVLTVLHQDWLNGKEYKCKVSNKALGAPIEKTISKAKGQPREPQVYTLPPSREEMTKNQVSLTCLVKGFYPSDIAVEWESNGQPENNYKTTPPVLDSDGSFFLYSKLTVDKSRWQQGNVFSCSVMHEALHNHYTQKSLSLSPGK

SEQ ID NO: 5652 - protein, 465 aa, synthetic construct
MGWSCIILFLVATATGVHSEVQLVESGGGLVKPGGSLRLSCAASGFTFSSYSMNWVRQAPGKGLEWVSSISSSSSYIYYADSVKGRFTISRDNAKNSLYLQMNSLRAEDTAVYYCARESSGFDYWGQGTLVTVSSASTKGPSVFPLAPSSKSTSGGTAALGCLVKDYFPEPVTVSWNSGALTSGVHTFPAVLQSSGLYSLSSVVTVPSSSLGTQTYICNVNHKPSNTKVDKKVEPKSCDKTHTCPPCPAPEAAGGPSVFLFPPKPKDTLMISRTPEVTCVVVDVSHEDPEVKFNWYVDGVEVHNAKTKPREEQYNSTYRVVSVLTVLHQDWLNGKEYKCKVSNKALGAPIEKTISKAKGQPREPQVYTLPPSREEMTKNQVSLTCLVKGFYPSDIAVEWESNGQPENNYKTTPPVLDSDGSFFLYSKLTVDKSRWQQGNVFSCSVMHEALHNHYTQKSLSLSPGK

SEQ ID NO: 5653 - protein, 465 aa, synthetic construct
MGWSCIILFLVATATGVHSQVQLVQSGAEVKKPGASVKVSCKASGYTFTSYDINWVRQATGQGLEWMGWMNPNSGNTGYAQKFQGRVTMTRNTSISTAYMELSSLRSEDTAVYYCARGSSWFDYWGQGTLVTVSSASTKGPSVFPLAPSSKSTSGGTAALGCLVKDYFPEPVTVSWNSGALTSGVHTFPAVLQSSGLYSLSSVVTVPSSSLGTQTYICNVNHKPSNTKVDKKVEPKSCDKTHTCPPCPAPEAAGGPSVFLFPPKPKDTLMISRTPEVTCVVVDVSHEDPEVKFNWYVDGVEVHNAKTKPREEQYNSTYRVVSVLTVLHQDWLNGKEYKCKVSNKALGAPIEKTISKAKGQPREPQVYTLPPSREEMTKNQVSLTCLVKGFYPSDIAVEWESNGQPENNYKTTPPVLDSDGSFFLYSKLTVDKSRWQQGNVFSCSVMHEALHNHYTQKSLSLSPGK

SEQ ID NO: 5654 - protein, 465 aa, synthetic construct
MGWSCIILFLVATATGVHSEVQLVESGGGLVKPGGSLRLSCAASGFTFSNAWMSWVRQAPGKGLEWVGRIKSKTDGGTTDYAAPVKGRFTISRDDSKNTLYLQMNSLKTEDTAVYYCTLNWGDYWGQGTLVTVSSASTKGPSVFPLAPSSKSTSGGTAALGCLVKDYFPEPVTVSWNSGALTSGVHTFPAVLQSSGLYSLSSVVTVPSSSLGTQTYICNVNHKPSNTKVDKKVEPKSCDKTHTCPPCPAPEAAGGPSVFLFPPKPKDTLMISRTPEVTCVVVDVSHEDPEVKFNWYVDGVEVHNAKTKPREEQYNSTYRVVSVLTVLHQDWLNGKEYKCKVSNKALGAPIEKTISKAKGQPREPQVYTLPPSREEMTKNQVSLTCLVKGFYPSDIAVEWESNGQPENNYKTTPPVLDSDGSFFLYSKLTVDKSRWQQGNVFSCSVMHEALHNHYTQKSLSLSPGK

SEQ ID NO: 5655 - protein, 465 aa, synthetic construct
MGWSCIILFLVATATGVHSEVQLVESGGGLVKPGGSLRLSCAASGFTFSSYSMNWVRQAPGKGLEWVSSISSSSSYIYYADSVKGRFTISRDNAKNSLYLQMNSLRAEDTAVYYCARAADAFDIWGQGTMVTVSSASTKGPSVFPLAPSSKSTSGGTAALGCLVKDYFPEPVTVSWNSGALTSGVHTFPAVLQSSGLYSLSSVVTVPSSSLGTQTYICNVNHKPSNTKVDKKVEPKSCDKTHTCPPCPAPEAAGGPSVFLFPPKPKDTLMISRTPEVTCVVVDVSHEDPEVKFNWYVDGVEVHNAKTKPREEQYNSTYRVVSVLTVLHQDWLNGKEYKCKVSNKALGAPIEKTISKAKGQPREPQVYTLPPSREEMTKNQVSLTCLVKGFYPSDIAVEWESNGQPENNYKTTPPVLDSDGSFFLYSKLTVDKSRWQQGNVFSCSVMHEALHNHYTQKSLSLSPGK

SEQ ID NO: 5656 - protein, 465 aa, synthetic construct
MGWSCIILFLVATATGVHSEVQLVESGGGLVQPGGSLRLSCAASGFTFSSYDMHWVRQATGKGLEWVSAIGTAGDTYYPGSVKGRFTISRENAKNSLYLQMNSLRAGDTAVYYCARGGSDAFDIWGQGTMVTVSSASTKGPSVFPLAPSSKSTSGGTAALGCLVKDYFPEPVTVSWNSGALTSGVHTFPAVLQSSGLYSLSSVVTVPSSSLGTQTYICNVNHKPSNTKVDKKVEPKSCDKTHTCPPCPAPEAAGGPSVFLFPPKPKDTLMISRTPEVTCVVVDVSHEDPEVKFNWYVDGVEVHNAKTKPREEQYNSTYRVVSVLTVLHQDWLNGKEYKCKVSNKALGAPIEKTISKAKGQPREPQVYTLPPSREEMTKNQVSLTCLVKGFYPSDIAVEWESNGQPENNYKTTPPVLDSDGSFFLYSKLTVDKSRWQQGNVFSCSVMHEALHNHYTQKSLSLSPGK

SEQ ID NO: 5657 - protein, 465 aa, synthetic construct
MGWSCIILFLVATATGVHSEVQLVESGGGLVKPGGSLRLSCTASEFTFRNAWMIWVRQAPGKGLEWVGRIRSEIDGGTTDYAAPVKGRFTISRDDSKDTLYLYMNSLKVEDTAVYYCTTDHPYYWGHGTLVTVSSASTKGPSVFPLAPSSKSTSGGTAALGCLVKDYFPEPVTVSWNSGALTSGVHTFPAVLQSSGLYSLSSVVTVPSSSLGTQTYICNVNHKPSNTKVDKKVEPKSCDKTHTCPPCPAPEAAGGPSVFLFPPKPKDTLMISRTPEVTCVVVDVSHEDPEVKFNWYVDGVEVHNAKTKPREEQYNSTYRVVSVLTVLHQDWLNGKEYKCKVSNKALGAPIEKTISKAKGQPREPQVYTLPPSREEMTKNQVSLTCLVKGFYPSDIAVEWESNGQPENNYKTTPPVLDSDGSFFLYSKLTVDKSRWQQGNVFSCSVMHEALHNHYTQKSLSLSPGK

SEQ ID NO: 5658 - protein, 465 aa, synthetic construct
MGWSCIILFLVATATGVHSEVQLVESGGGLVKPGGSLRLSCAASGFTFSNAWMSWVRQAPGKGLEWVGRIKSKTDGGTTDFTAPVKGRFTISRDDSKNTLYLQMNSLKTEDTAVYYCTTDHPYYWGQGTLVTVSSASTKGPSVFPLAPSSKSTSGGTAALGCLVKDYFPEPVTVSWNSGALTSGVHTFPAVLQSSGLYSLSSVVTVPSSSLGTQTYICNVNHKPSNTKVDKKVEPKSCDKTHTCPPCPAPEAAGGPSVFLFPPKPKDTLMISRTPEVTCVVVDVSHEDPEVKFNWYVDGVEVHNAKTKPREEQYNSTYRVVSVLTVLHQDWLNGKEYKCKVSNKALGAPIEKTISKAKGQPREPQVYTLPPSREEMTKNQVSLTCLVKGFYPSDIAVEWESNGQPENNYKTTPPVLDSDGSFFLYSKLTVDKSRWQQGNVFSCSVMHEALHNHYTQKSLSLSPGK

SEQ ID NO: 5659 - protein, 465 aa, synthetic construct
MGWSCIILFLVATATGVHSQVQLVESGGGVVQPGRSLRLSCAASGFTFSNYGIHWVRQAPGKGLEWVAVIWYDGSNEYYVDSVKGRFIISRDNSKNTLYLQMNSLRAEDTALYYCALAVTGFDYWGQGTLVTVSSASTKGPSVFPLAPSSKSTSGGTAALGCLVKDYFPEPVTVSWNSGALTSGVHTFPAVLQSSGLYSLSSVVTVPSSSLGTQTYICNVNHKPSNTKVDKKVEPKSCDKTHTCPPCPAPEAAGGPSVFLFPPKPKDTLMISRTPEVTCVVVDVSHEDPEVKFNWYVDGVEVHNAKTKPREEQYNSTYRVVSVLTVLHQDWLNGKEYKCKVSNKALGAPIEKTISKAKGQPREPQVYTLPPSREEMTKNQVSLTCLVKGFYPSDIAVEWESNGQPENNYKTTPPVLDSDGSFFLYSKLTVDKSRWQQGNVFSCSVMHEALHNHYTQKSLSLSPGK

SEQ ID NO: 5660 - protein, 465 aa, synthetic construct
MGWSCIILFLVATATGVHSQVQLVESGGGLVKPGGSLRLSCAASGFTFSDYYMSWIRQAPGKGLEWVSYISSSGSTIYYPDSVKGRFTISRDNAKNSLYLQMNSLRAEDTAVYYCARDGAAFDIWGQGTMVTVSSASTKGPSVFPLAPSSKSTSGGTAALGCLVKDYFPEPVTVSWNSGALTSGVHTFPAVLQSSGLYSLSSVVTVPSSSLGTQTYICNVNHKPSNTKVDKKVEPKSCDKTHTCPPCPAPEAAGGPSVFLFPPKPKDTLMISRTPEVTCVVVDVSHEDPEVKFNWYVDGVEVHNAKTKPREEQYNSTYRVVSVLTVLHQDWLNGKEYKCKVSNKALGAPIEKTISKAKGQPREPQVYTLPPSREEMTKNQVSLTCLVKGFYPSDIAVEWESNGQPENNYKTTPPVLDSDGSFFLYSKLTVDKSRWQQGNVFSCSVMHEALHNHYTQKSLSLSPGK

SEQ ID NO: 5661 - protein, 466 aa, synthetic construct
MGWSCIILFLVATATGVHSQVQLVQSGAEMKKPGASVKVSCKASGYTFTNYGISWVRQAPGQGLEWMGWINTYNDKTNFALKVQGRVTMTTDTSTSTAYMELRSLRSDDTAVYYCARDRGYSFDYWGQGTLVTVSSASTKGPSVFPLAPSSKSTSGGTAALGCLVKDYFPEPVTVSWNSGALTSGVHTFPAVLQSSGLYSLSSVVTVPSSSLGTQTYICNVNHKPSNTKVDKKVEPKSCDKTHTCPPCPAPEAAGGPSVFLFPPKPKDTLMISRTPEVTCVVVDVSHEDPEVKFNWYVDGVEVHNAKTKPREEQYNSTYRVVSVLTVLHQDWLNGKEYKCKVSNKALGAPIEKTISKAKGQPREPQVYTLPPSREEMTKNQVSLTCLVKGFYPSDIAVEWESNGQPENNYKTTPPVLDSDGSFFLYSKLTVDKSRWQQGNVFSCSVMHEALHNHYTQKSLSLSPGK

SEQ ID NO: 5662 - protein, 466 aa, synthetic construct
MGWSCIILFLVATATGVHSQVQLVQSGAEVKKPGASVKVSCKASGYTFTSYGISWVRQAPGQGLEWMGWISAYNGNTNYAQRLQGRVTMTTDTSTSTAYMELRSLISDDTAVYYCARNHYYYLDVWGKGTTVTVSSASTKGPSVFPLAPSSKSTSGGTAALGCLVKDYFPEPVTVSWNSGALTSGVHTFPAVLQSSGLYSLSSVVTVPSSSLGTQTYICNVNHKPSNTKVDKKVEPKSCDKTHTCPPCPAPEAAGGPSVFLFPPKPKDTLMISRTPEVTCVVVDVSHEDPEVKFNWYVDGVEVHNAKTKPREEQYNSTYRVVSVLTVLHQDWLNGKEYKCKVSNKALGAPIEKTISKAKGQPREPQVYTLPPSREEMTKNQVSLTCLVKGFYPSDIAVEWESNGQPENNYKTTPPVLDSDGSFFLYSKLTVDKSRWQQGNVFSCSVMHEALHNHYTQKSLSLSPGK

SEQ ID NO: 5663 - protein, 466 aa, synthetic construct
MGWSCIILFLVATATGVHSEVQLVESGGGLVQPGGSLRLSCAASGFTFSSYDMHWVRQATGKGLEWVSAIGTAGDTYYPGSVKGRFTISRENAKNSLYLQMNSLRAGDTAVYYCARVSPTGTTDYWGQGTLVTVSSASTKGPSVFPLAPSSKSTSGGTAALGCLVKDYFPEPVTVSWNSGALTSGVHTFPAVLQSSGLYSLSSVVTVPSSSLGTQTYICNVNHKPSNTKVDKKVEPKSCDKTHTCPPCPAPEAAGGPSVFLFPPKPKDTLMISRTPEVTCVVVDVSHEDPEVKFNWYVDGVEVHNAKTKPREEQYNSTYRVVSVLTVLHQDWLNGKEYKCKVSNKALGAPIEKTISKAKGQPREPQVYTLPPSREEMTKNQVSLTCLVKGFYPSDIAVEWESNGQPENNYKTTPPVLDSDGSFFLYSKLTVDKSRWQQGNVFSCSVMHEALHNHYTQKSLSLSPGK

SEQ ID NO: 5664 - protein, 466 aa, synthetic construct
MGWSCIILFLVATATGVHSEVQLVESGGGLVKPGGSLRLSCAASGFTFSNAWMSWVRQAPGKGLEWVGRIKSKTDGGTTDYAAPVKGRFTISRDDSKNTLYLQMNSLKTEDTAVYYCTARPLGDVWGKGTTVTVSSASTKGPSVFPLAPSSKSTSGGTAALGCLVKDYFPEPVTVSWNSGALTSGVHTFPAVLQSSGLYSLSSVVTVPSSSLGTQTYICNVNHKPSNTKVDKKVEPKSCDKTHTCPPCPAPEAAGGPSVFLFPPKPKDTLMISRTPEVTCVVVDVSHEDPEVKFNWYVDGVEVHNAKTKPREEQYNSTYRVVSVLTVLHQDWLNGKEYKCKVSNKALGAPIEKTISKAKGQPREPQVYTLPPSREEMTKNQVSLTCLVKGFYPSDIAVEWESNGQPENNYKTTPPVLDSDGSFFLYSKLTVDKSRWQQGNVFSCSVMHEALHNHYTQKSLSLSPGK

SEQ ID NO: 5665 - protein, 466 aa, synthetic construct
MGWSCIILFLVATATGVHSEVQLVESGGGLVKPGGSLRLSCAASGFTFSNAWMSWVRQAPGKGLEWVGRIKSKTDGGTTDYAAPVKGRFTISRDDSKNTLYLQMNSLKTEDTAVYYCTTDNGFDYWGQGTLVTVSSASTKGPSVFPLAPSSKSTSGGTAALGCLVKDYFPEPVTVSWNSGALTSGVHTFPAVLQSSGLYSLSSVVTVPSSSLGTQTYICNVNHKPSNTKVDKKVEPKSCDKTHTCPPCPAPEAAGGPSVFLFPPKPKDTLMISRTPEVTCVVVDVSHEDPEVKFNWYVDGVEVHNAKTKPREEQYNSTYRVVSVLTVLHQDWLNGKEYKCKVSNKALGAPIEKTISKAKGQPREPQVYTLPPSREEMTKNQVSLTCLVKGFYPSDIAVEWESNGQPENNYKTTPPVLDSDGSFFLYSKLTVDKSRWQQGNVFSCSVMHEALHNHYTQKSLSLSPGK

SEQ ID NO: 5666 - protein, 466 aa, synthetic construct
MGWSCIILFLVATATGVHSEVQLVESGGGLVKPGGSLRLSCAASGFTFSSYSMNWVRQAPGKGLEWVSSISSSSSYIYYADSVKGRFTISRDNAKNSLYLQMNSLRAEDTAVYYCARDLISSFDYWGQGTLVTVSSASTKGPSVFPLAPSSKSTSGGTAALGCLVKDYFPEPVTVSWNSGALTSGVHTFPAVLQSSGLYSLSSVVTVPSSSLGTQTYICNVNHKPSNTKVDKKVEPKSCDKTHTCPPCPAPEAAGGPSVFLFPPKPKDTLMISRTPEVTCVVVDVSHEDPEVKFNWYVDGVEVHNAKTKPREEQYNSTYRVVSVLTVLHQDWLNGKEYKCKVSNKALGAPIEKTISKAKGQPREPQVYTLPPSREEMTKNQVSLTCLVKGFYPSDIAVEWESNGQPENNYKTTPPVLDSDGSFFLYSKLTVDKSRWQQGNVFSCSVMHEALHNHYTQKSLSLSPGK

SEQ ID NO: 5667 - protein, 466 aa, synthetic construct
MGWSCIILFLVATATGVHSEVQLVESGGGLVQPGGSLRLSCAASGFTFSSYWMSWVRQAPGKGLEWVANIKQDGSEKYYVDSVKGRFTISRDNAKNSLYLQMNSLRAEDTAVYYCARRIVGAFDYWGQGTLVTVSSASTKGPSVFPLAPSSKSTSGGTAALGCLVKDYFPEPVTVSWNSGALTSGVHTFPAVLQSSGLYSLSSVVTVPSSSLGTQTYICNVNHKPSNTKVDKKVEPKSCDKTHTCPPCPAPEAAGGPSVFLFPPKPKDTLMISRTPEVTCVVVDVSHEDPEVKFNWYVDGVEVHNAKTKPREEQYNSTYRVVSVLTVLHQDWLNGKEYKCKVSNKALGAPIEKTISKAKGQPREPQVYTLPPSREEMTKNQVSLTCLVKGFYPSDIAVEWESNGQPENNYKTTPPVLDSDGSFFLYSKLTVDKSRWQQGNVFSCSVMHEALHNHYTQKSLSLSPGK

SEQ ID NO: 5668 - protein, 466 aa, synthetic construct
MGWSCIILFLVATATGVHSQVQLVQSGTEVKKPGASVKVSCMASRYTFTSYYIHWVRQAPGQGLEWMGIINPSGGTTGYAQKFQGRVTMTRDTSTSTVYMELYSLRSEDTAVYYCARGGWGTMDVWGKGTTVTVSSASTKGPSVFPLAPSSKSTSGGTAALGCLVKDYFPEPVTVSWNSGALTSGVHTFPAVLQSSGLYSLSSVVTVPSSSLGTQTYICNVNHKPSNTKVDKKVEPKSCDKTHTCPPCPAPEAAGGPSVFLFPPKPKDTLMISRTPEVTCVVVDVSHEDPEVKFNWYVDGVEVHNAKTKPREEQYNSTYRVVSVLTVLHQDWLNGKEYKCKVSNKALGAPIEKTISKAKGQPREPQVYTLPPSREEMTKNQVSLTCLVKGFYPSDIAVEWESNGQPENNYKTTPPVLDSDGSFFLYSKLTVDKSRWQQGNVFSCSVMHEALHNHYTQKSLSLSPGK

SEQ ID NO: 5669 - protein, 466 aa, synthetic construct
MGWSCIILFLVATATGVHSEVQLVESGGGLVQPGGSLRLSCAASGFTFSSYSMNWVRQAPGKGLEWVSYISSSSSTIYYADSVKGRFTISRDNAKNSLYLQMNSLRDEDTAVYYCAREGWELLDYWGQGTLVTVSSASTKGPSVFPLAPSSKSTSGGTAALGCLVKDYFPEPVTVSWNSGALTSGVHTFPAVLQSSGLYSLSSVVTVPSSSLGTQTYICNVNHKPSNTKVDKKVEPKSCDKTHTCPPCPAPEAAGGPSVFLFPPKPKDTLMISRTPEVTCVVVDVSHEDPEVKFNWYVDGVEVHNAKTKPREEQYNSTYRVVSVLTVLHQDWLNGKEYKCKVSNKALGAPIEKTISKAKGQPREPQVYTLPPSREEMTKNQVSLTCLVKGFYPSDIAVEWESNGQPENNYKTTPPVLDSDGSFFLYSKLTVDKSRWQQGNVFSCSVMHEALHNHYTQKSLSLSPGK

SEQ ID NO: 5670 - protein, 466 aa, synthetic construct
MGWSCIILFLVATATGVHSEVQLVESGGGLIQPGGSLRLSCAASGLTVSTNYMSWVRQAPGKGLEWVSVLYSGGGTYYADSVKGRFTISRDNSKNTLCLQMNSLRAEDTAMYYCARDNWDSYFDYWGQGTLVTVSSASTKGPSVFPLAPSSKSTSGGTAALGCLVKDYFPEPVTVSWNSGALTSGVHTFPAVLQSSGLYSLSSVVTVPSSSLGTQTYICNVNHKPSNTKVDKKVEPKSCDKTHTCPPCPAPEAAGGPSVFLFPPKPKDTLMISRTPEVTCVVVDVSHEDPEVKFNWYVDGVEVHNAKTKPREEQYNSTYRVVSVLTVLHQDWLNGKEYKCKVSNKALGAPIEKTISKAKGQPREPQVYTLPPSREEMTKNQVSLTCLVKGFYPSDIAVEWESNGQPENNYKTTPPVLDSDGSFFLYSKLTVDKSRWQQGNVFSCSVMHEALHNHYTQKSLSLSPGK

SEQ ID NO: 5671 - protein, 466 aa, synthetic construct
MGWSCIILFLVATATGVHSEVQLVESGGGVVRPGGSLRLSCAASGFTFDDYGMSWVRQAPGKGLEWVSGINWNGGSTGYADSVKGRFTISRDNAKNSLYLQMNSLRAEDTALYYCARTTVTHMDVWGKGTTVTVSSASTKGPSVFPLAPSSKSTSGGTAALGCLVKDYFPEPVTVSWNSGALTSGVHTFPAVLQSSGLYSLSSVVTVPSSSLGTQTYICNVNHKPSNTKVDKKVEPKSCDKTHTCPPCPAPEAAGGPSVFLFPPKPKDTLMISRTPEVTCVVVDVSHEDPEVKFNWYVDGVEVHNAKTKPREEQYNSTYRVVSVLTVLHQDWLNGKEYKCKVSNKALGAPIEKTISKAKGQPREPQVYTLPPSREEMTKNQVSLTCLVKGFYPSDIAVEWESNGQPENNYKTTPPVLDSDGSFFLYSKLTVDKSRWQQGNVFSCSVMHEALHNHYTQKSLSLSPGK

SEQ ID NO: 5672 - protein, 466 aa, synthetic construct
MGWSCIILFLVATATGVHSEVQLVESGGGLIQPGGSLRLSCAASGFTVSSNYMSWVRQAPGKGLEWVSVIYSGGSTYYADSVKGRFTISRDNSKNTLYLQMNSLRAEDTAVYYCARDWNYDAFDIWGQGTMVTVSSASTKGPSVFPLAPSSKSTSGGTAALGCLVKDYFPEPVTVSWNSGALTSGVHTFPAVLQSSGLYSLSSVVTVPSSSLGTQTYICNVNHKPSNTKVDKKVEPKSCDKTHTCPPCPAPEAAGGPSVFLFPPKPKDTLMISRTPEVTCVVVDVSHEDPEVKFNWYVDGVEVHNAKTKPREEQYNSTYRVVSVLTVLHQDWLNGKEYKCKVSNKALGAPIEKTISKAKGQPREPQVYTLPPSREEMTKNQVSLTCLVKGFYPSDIAVEWESNGQPENNYKTTPPVLDSDGSFFLYSKLTVDKSRWQQGNVFSCSVMHEALHNHYTQKSLSLSPGK

SEQ ID NO: 5673 - protein, 466 aa, synthetic construct
MGWSCIILFLVATATGVHSEVQLVESGGGLVKPGGSLRLSCAASGFTFSSYSMNWVRQAPGKGLEWVSSISSSSSYIYYADSVKGRFTISRDNAKNSLYLQMNSLRAEDTAVYYCARGDPGWFDPWGQGTLVTVSSASTKGPSVFPLAPSSKSTSGGTAALGCLVKDYFPEPVTVSWNSGALTSGVHTFPAVLQSSGLYSLSSVVTVPSSSLGTQTYICNVNHKPSNTKVDKKVEPKSCDKTHTCPPCPAPEAAGGPSVFLFPPKPKDTLMISRTPEVTCVVVDVSHEDPEVKFNWYVDGVEVHNAKTKPREEQYNSTYRVVSVLTVLHQDWLNGKEYKCKVSNKALGAPIEKTISKAKGQPREPQVYTLPPSREEMTKNQVSLTCLVKGFYPSDIAVEWESNGQPENNYKTTPPVLDSDGSFFLYSKLTVDKSRWQQGNVFSCSVMHEALHNHYTQKSLSLSPGK

SEQ ID NO: 5674 - protein, 467 aa, synthetic construct
MGWSCIILFLVATATGVHSEVQLVESGGGLVQPGGSLRLSCAASGFTFSSYWMHWVRQAPGKGLVWVSRINSDGSSTSYADSVKGRFTISRDNAKNTLYLQMNSLRAEDTAVYYCARENWNYWFDPWGQGTLVTVSSASTKGPSVFPLAPSSKSTSGGTAALGCLVKDYFPEPVTVSWNSGALTSGVHTFPAVLQSSGLYSLSSVVTVPSSSLGTQTYICNVNHKPSNTKVDKKVEPKSCDKTHTCPPCPAPEAAGGPSVFLFPPKPKDTLMISRTPEVTCVVVDVSHEDPEVKFNWYVDGVEVHNAKTKPREEQYNSTYRVVSVLTVLHQDWLNGKEYKCKVSNKALGAPIEKTISKAKGQPREPQVYTLPPSREEMTKNQVSLTCLVKGFYPSDIAVEWESNGQPENNYKTTPPVLDSDGSFFLYSKLTVDKSRWQQGNVFSCSVMHEALHNHYTQKSLSLSPGK

SEQ ID NO: 5675 - protein, 467 aa, synthetic construct
MGWSCIILFLVATATGVHSQVQLQESGPGLVKPSGTLSLTCAVSGGSISSNNWWSWVRQPPGKGLEWIGEIYHSGSTNYNPSLKSRVTISVDKSKNQFSLKVNSVTAADTAIFYCARLRPGDSFDYWGLGTLVTVSSASTKGPSVFPLAPSSKSTSGGTAALGCLVKDYFPEPVTVSWNSGALTSGVHTFPAVLQSSGLYSLSSVVTVPSSSLGTQTYICNVNHKPSNTKVDKKVEPKSCDKTHTCPPCPAPEAAGGPSVFLFPPKPKDTLMISRTPEVTCVVVDVSHEDPEVKFNWYVDGVEVHNAKTKPREEQYNSTYRVVSVLTVLHQDWLNGKEYKCKVSNKALGAPIEKTISKAKGQPREPQVYTLPPSREEMTKNQVSLTCLVKGFYPSDIAVEWESNGQPENNYKTTPPVLDSDGSFFLYSKLTVDKSRWQQGNVFSCSVMHEALHNHYTQKSLSLSPGK

SEQ ID NO: 5676 - protein, 467 aa, synthetic construct
MGWSCIILFLVATATGVHSQVQLVQSGSELKKPGASVKVSCKASGYTFTRNGLNWVRQAPGQGLEWMGWINTNIGNPTYAQGFTGRFVFSLDTSVSTAYLQISRLQAEDTAVYYCARSPNWGLFDYWGQGTLVTVSSASTKGPSVFPLAPSSKSTSGGTAALGCLVKDYFPEPVTVSWNSGALTSGVHTFPAVLQSSGLYSLSSVVTVPSSSLGTQTYICNVNHKPSNTKVDKKVEPKSCDKTHTCPPCPAPEAAGGPSVFLFPPKPKDTLMISRTPEVTCVVVDVSHEDPEVKFNWYVDGVEVHNAKTKPREEQYNSTYRVVSVLTVLHQDWLNGKEYKCKVSNKALGAPIEKTISKAKGQPREPQVYTLPPSREEMTKNQVSLTCLVKGFYPSDIAVEWESNGQPENNYKTTPPVLDSDGSFFLYSKLTVDKSRWQQGNVFSCSVMHEALHNHYTQKSLSLSPGK

SEQ ID NO: 5677 - protein, 467 aa, synthetic construct
MGWSCIILFLVATATGVHSEVQLVESGGGLVKPGGSLRLSCAASGFTFSSYSMNWVRQAPGKGLEWVSSISSSSSYIYYADSVKGRFTISRDNAKNSLYLQMNSLRAEDTAVYYCARDRGATGFDYWGQGTLVTVSSASTKGPSVFPLAPSSKSTSGGTAALGCLVKDYFPEPVTVSWNSGALTSGVHTFPAVLQSSGLYSLSSVVTVPSSSLGTQTYICNVNHKPSNTKVDKKVEPKSCDKTHTCPPCPAPEAAGGPSVFLFPPKPKDTLMISRTPEVTCVVVDVSHEDPEVKFNWYVDGVEVHNAKTKPREEQYNSTYRVVSVLTVLHQDWLNGKEYKCKVSNKALGAPIEKTISKAKGQPREPQVYTLPPSREEMTKNQVSLTCLVKGFYPSDIAVEWESNGQPENNYKTTPPVLDSDGSFFLYSKLTVDKSRWQQGNVFSCSVMHEALHNHYTQKSLSLSPGK

SEQ ID NO: 5678 - protein, 467 aa, synthetic construct
MGWSCIILFLVATATGVHSQVQLVQSGAEVKKPGASVKVSCKASGYTFTSYGISWVRQAPGQGLEWMGWISAYNGNTNYAQKLQGRVTMTTDTSTSTAYMELRSLRSDDTAVYYCARESGELLGDYWGQGTLVTVSSASTKGPSVFPLAPSSKSTSGGTAALGCLVKDYFPEPVTVSWNSGALTSGVHTFPAVLQSSGLYSLSSVVTVPSSSLGTQTYICNVNHKPSNTKVDKKVEPKSCDKTHTCPPCPAPEAAGGPSVFLFPPKPKDTLMISRTPEVTCVVVDVSHEDPEVKFNWYVDGVEVHNAKTKPREEQYNSTYRVVSVLTVLHQDWLNGKEYKCKVSNKALGAPIEKTISKAKGQPREPQVYTLPPSREEMTKNQVSLTCLVKGFYPSDIAVEWESNGQPENNYKTTPPVLDSDGSFFLYSKLTVDKSRWQQGNVFSCSVMHEALHNHYTQKSLSLSPGK

SEQ ID NO: 5679 - protein, 467 aa, synthetic construct
MGWSCIILFLVATATGVHSEVQLVESGGGLVQPGGSLRLSCAASGFTFSSYDMHWVRQATGKGLEWVSAIGTAGDTYYPGSVKGRFTISRENAKNSLYLQMNSLRAGDTAVYYCARYSGSYYYFDYWGQGTLVTVSSASTKGPSVFPLAPSSKSTSGGTAALGCLVKDYFPEPVTVSWNSGALTSGVHTFPAVLQSSGLYSLSSVVTVPSSSLGTQTYICNVNHKPSNTKVDKKVEPKSCDKTHTCPPCPAPEAAGGPSVFLFPPKPKDTLMISRTPEVTCVVVDVSHEDPEVKFNWYVDGVEVHNAKTKPREEQYNSTYRVVSVLTVLHQDWLNGKEYKCKVSNKALGAPIEKTISKAKGQPREPQVYTLPPSREEMTKNQVSLTCLVKGFYPSDIAVEWESNGQPENNYKTTPPVLDSDGSFFLYSKLTVDKSRWQQGNVFSCSVMHEALHNHYTQKSLSLSPGK

SEQ ID NO: 5680 - protein, 467 aa, synthetic construct
MGWSCIILFLVATATGVHSQVQLVESGGGVVQPGRSLRLSCAASGFTFSSYGMHWVRQAPGKGLEWVAVIWYDGSNKYYADSVKGRFTISRDNSKNTLYLQMNSLRAEDTAVYYCARGIAAAGKDYWGQGTLVTVSSASTKGPSVFPLAPSSKSTSGGTAALGCLVKDYFPEPVTVSWNSGALTSGVHTFPAVLQSSGLYSLSSVVTVPSSSLGTQTYICNVNHKPSNTKVDKKVEPKSCDKTHTCPPCPAPEAAGGPSVFLFPPKPKDTLMISRTPEVTCVVVDVSHEDPEVKFNWYVDGVEVHNAKTKPREEQYNSTYRVVSVLTVLHQDWLNGKEYKCKVSNKALGAPIEKTISKAKGQPREPQVYTLPPSREEMTKNQVSLTCLVKGFYPSDIAVEWESNGQPENNYKTTPPVLDSDGSFFLYSKLTVDKSRWQQGNVFSCSVMHEALHNHYTQKSLSLSPGK

SEQ ID NO: 5681 - protein, 467 aa, synthetic construct
MGWSCIILFLVATATGVHSEVQLVQSGAEVKKPGESLKISCKGSGYSFTSYWIGWVRQMPGKGLEWMGIIYPGDSDTRYSPSFQGQVTISADKSISTAYLQWSSLKASDTAMYYCARQDSNYVFDYWGQGTLVTVSSASTKGPSVFPLAPSSKSTSGGTAALGCLVKDYFPEPVTVSWNSGALTSGVHTFPAVLQSSGLYSLSSVVTVPSSSLGTQTYICNVNHKPSNTKVDKKVEPKSCDKTHTCPPCPAPEAAGGPSVFLFPPKPKDTLMISRTPEVTCVVVDVSHEDPEVKFNWYVDGVEVHNAKTKPREEQYNSTYRVVSVLTVLHQDWLNGKEYKCKVSNKALGAPIEKTISKAKGQPREPQVYTLPPSREEMTKNQVSLTCLVKGFYPSDIAVEWESNGQPENNYKTTPPVLDSDGSFFLYSKLTVDKSRWQQGNVFSCSVMHEALHNHYTQKSLSLSPGK

SEQ ID NO: 5682 - protein, 467 aa, synthetic construct
MGWSCIILFLVATATGVHSEVQLVESGGGLVQPGGSLRLSCAASGFTFSNYWMSWVRQAPGKGLEWVANIKYDGREQYYVDSVKGRFAISRDNAKNSLSLQMNSLRAEDTAIYYCARDHSAWSFDYWGQGTLVTVSSASTKGPSVFPLAPSSKSTSGGTAALGCLVKDYFPEPVTVSWNSGALTSGVHTFPAVLQSSGLYSLSSVVTVPSSSLGTQTYICNVNHKPSNTKVDKKVEPKSCDKTHTCPPCPAPEAAGGPSVFLFPPKPKDTLMISRTPEVTCVVVDVSHEDPEVKFNWYVDGVEVHNAKTKPREEQYNSTYRVVSVLTVLHQDWLNGKEYKCKVSNKALGAPIEKTISKAKGQPREPQVYTLPPSREEMTKNQVSLTCLVKGFYPSDIAVEWESNGQPENNYKTTPPVLDSDGSFFLYSKLTVDKSRWQQGNVFSCSVMHEALHNHYTQKSLSLSPGK

SEQ ID NO: 5683 - protein, 467 aa, synthetic construct
MGWSCIILFLVATATGVHSEVQLVESGGGLVQPGGSLRLSCAASGFTFSSYWMSWVRQAPGKGLEWVANIKQDGSEKYYVDSVKGRFTISRDNAKNSLYLQMNSLRAEDTAVYYCARRRGSCSFDYWGQGTLVTVSSASTKGPSVFPLAPSSKSTSGGTAALGCLVKDYFPEPVTVSWNSGALTSGVHTFPAVLQSSGLYSLSSVVTVPSSSLGTQTYICNVNHKPSNTKVDKKVEPKSCDKTHTCPPCPAPEAAGGPSVFLFPPKPKDTLMISRTPEVTCVVVDVSHEDPEVKFNWYVDGVEVHNAKTKPREEQYNSTYRVVSVLTVLHQDWLNGKEYKCKVSNKALGAPIEKTISKAKGQPREPQVYTLPPSREEMTKNQVSLTCLVKGFYPSDIAVEWESNGQPENNYKTTPPVLDSDGSFFLYSKLTVDKSRWQQGNVFSCSVMHEALHNHYTQKSLSLSPGK

SEQ ID NO: 5684 - protein, 467 aa, synthetic construct
MGWSCIILFLVATATGVHSQVQLVQSGAEVKKPGASVKVSCKASGYTFTSYGISWVRQAPGQGLEWMGWISAYNGNTNYAQKLQGRVTMTTDTSTSTAYMELRSLRSDDTAVYYCARRSYANCFDYWGQGTLVTVSSASTKGPSVFPLAPSSKSTSGGTAALGCLVKDYFPEPVTVSWNSGALTSGVHTFPAVLQSSGLYSLSSVVTVPSSSLGTQTYICNVNHKPSNTKVDKKVEPKSCDKTHTCPPCPAPEAAGGPSVFLFPPKPKDTLMISRTPEVTCVVVDVSHEDPEVKFNWYVDGVEVHNAKTKPREEQYNSTYRVVSVLTVLHQDWLNGKEYKCKVSNKALGAPIEKTISKAKGQPREPQVYTLPPSREEMTKNQVSLTCLVKGFYPSDIAVEWESNGQPENNYKTTPPVLDSDGSFFLYSKLTVDKSRWQQGNVFSCSVMHEALHNHYTQKSLSLSPGK

SEQ ID NO: 5685 - protein, 467 aa, synthetic construct
MGWSCIILFLVATATGVHSEVQLVESGGGLVQPGGSLRLSCAASGFTFSSYWMHWVRQAPGKGLVWVSRINSDGSSTSYADSVKGRFTISRDNAKNTLYLQMNSLRAEDTAVYYCARDEQLVPFDIWGQGTMVTVSSASTKGPSVFPLAPSSKSTSGGTAALGCLVKDYFPEPVTVSWNSGALTSGVHTFPAVLQSSGLYSLSSVVTVPSSSLGTQTYICNVNHKPSNTKVDKKVEPKSCDKTHTCPPCPAPEAAGGPSVFLFPPKPKDTLMISRTPEVTCVVVDVSHEDPEVKFNWYVDGVEVHNAKTKPREEQYNSTYRVVSVLTVLHQDWLNGKEYKCKVSNKALGAPIEKTISKAKGQPREPQVYTLPPSREEMTKNQVSLTCLVKGFYPSDIAVEWESNGQPENNYKTTPPVLDSDGSFFLYSKLTVDKSRWQQGNVFSCSVMHEALHNHYTQKSLSLSPGK

SEQ ID NO: 5686 - protein, 467 aa, synthetic construct
MGWSCIILFLVATATGVHSEVQLVESGGGLIQPGGSLRLSCAASGFTVSSNYMSWVRQAPGKGLEWVSVIYSGGSTYYADSVKGRFTISRDNSKNTLYLQMNSLRAEDTAVYYCARDGAAAGDFQHWGQGTLVTVSSASTKGPSVFPLAPSSKSTSGGTAALGCLVKDYFPEPVTVSWNSGALTSGVHTFPAVLQSSGLYSLSSVVTVPSSSLGTQTYICNVNHKPSNTKVDKKVEPKSCDKTHTCPPCPAPEAAGGPSVFLFPPKPKDTLMISRTPEVTCVVVDVSHEDPEVKFNWYVDGVEVHNAKTKPREEQYNSTYRVVSVLTVLHQDWLNGKEYKCKVSNKALGAPIEKTISKAKGQPREPQVYTLPPSREEMTKNQVSLTCLVKGFYPSDIAVEWESNGQPENNYKTTPPVLDSDGSFFLYSKLTVDKSRWQQGNVFSCSVMHEALHNHYTQKSLSLSPGK

SEQ ID NO: 5687 - protein, 467 aa, synthetic construct
MGWSCIILFLVATATGVHSEVQLVESGGGLVQPGRSLRLSCAASGFTFDDYAMHWVRQAPGKGLEWVSGISWNSGSIGYADSVKGRFTISRDNAKNSLYLQMNSLRAEDTALYYCAKDSGSYYFDYWGQGTLVTVSSASTKGPSVFPLAPSSKSTSGGTAALGCLVKDYFPEPVTVSWNSGALTSGVHTFPAVLQSSGLYSLSSVVTVPSSSLGTQTYICNVNHKPSNTKVDKKVEPKSCDKTHTCPPCPAPEAAGGPSVFLFPPKPKDTLMISRTPEVTCVVVDVSHEDPEVKFNWYVDGVEVHNAKTKPREEQYNSTYRVVSVLTVLHQDWLNGKEYKCKVSNKALGAPIEKTISKAKGQPREPQVYTLPPSREEMTKNQVSLTCLVKGFYPSDIAVEWESNGQPENNYKTTPPVLDSDGSFFLYSKLTVDKSRWQQGNVFSCSVMHEALHNHYTQKSLSLSPGK

SEQ ID NO: 5688 - protein, 467 aa, synthetic construct
MGWSCIILFLVATATGVHSQVQLVESGGGLVKPGGSLRLSCAASGFTFSDYYMSWIRQAPGKGLEWVSYISSSGSTIYYADSVKGRFTISRDNAKNSLYLQMNSLRAEDTAVYYCARDGQLWSFDYWGQGTLVTVSSASTKGPSVFPLAPSSKSTSGGTAALGCLVKDYFPEPVTVSWNSGALTSGVHTFPAVLQSSGLYSLSSVVTVPSSSLGTQTYICNVNHKPSNTKVDKKVEPKSCDKTHTCPPCPAPEAAGGPSVFLFPPKPKDTLMISRTPEVTCVVVDVSHEDPEVKFNWYVDGVEVHNAKTKPREEQYNSTYRVVSVLTVLHQDWLNGKEYKCKVSNKALGAPIEKTISKAKGQPREPQVYTLPPSREEMTKNQVSLTCLVKGFYPSDIAVEWESNGQPENNYKTTPPVLDSDGSFFLYSKLTVDKSRWQQGNVFSCSVMHEALHNHYTQKSLSLSPGK

SEQ ID NO: 5689 - protein, 467 aa, synthetic construct
MGWSCIILFLVATATGVHSEVQLVESGGGLIQPGGSLRLSCAASGFTVSRNYMSWVRQAPGKGLEWVSIIYAGGNTYYADSVKGRFTISRDNSKNTLYLQMNSLRAEDTGVYYCGRVVPIGNWFDPWGQGTLVTVSSASTKGPSVFPLAPSSKSTSGGTAALGCLVKDYFPEPVTVSWNSGALTSGVHTFPAVLQSSGLYSLSSVVTVPSSSLGTQTYICNVNHKPSNTKVDKKVEPKSCDKTHTCPPCPAPEAAGGPSVFLFPPKPKDTLMISRTPEVTCVVVDVSHEDPEVKFNWYVDGVEVHNAKTKPREEQYNSTYRVVSVLTVLHQDWLNGKEYKCKVSNKALGAPIEKTISKAKGQPREPQVYTLPPSREEMTKNQVSLTCLVKGFYPSDIAVEWESNGQPENNYKTTPPVLDSDGSFFLYSKLTVDKSRWQQGNVFSCSVMHEALHNHYTQKSLSLSPGK

SEQ ID NO: 5690 - protein, 467 aa, synthetic construct
MGWSCIILFLVATATGVHSEVQLVESGGGLVQPGGSLRLSCAASGFTFSSYWMSWVRQAPGKGLEWVANIKQDGSEKYYVDSVKGRFTISRDNAKNSLYLQMNSLRAEDTAVYYCARDSNWGVFDYWGQGTLVTVSSASTKGPSVFPLAPSSKSTSGGTAALGCLVKDYFPEPVTVSWNSGALTSGVHTFPAVLQSSGLYSLSSVVTVPSSSLGTQTYICNVNHKPSNTKVDKKVEPKSCDKTHTCPPCPAPEAAGGPSVFLFPPKPKDTLMISRTPEVTCVVVDVSHEDPEVKFNWYVDGVEVHNAKTKPREEQYNSTYRVVSVLTVLHQDWLNGKEYKCKVSNKALGAPIEKTISKAKGQPREPQVYTLPPSREEMTKNQVSLTCLVKGFYPSDIAVEWESNGQPENNYKTTPPVLDSDGSFFLYSKLTVDKSRWQQGNVFSCSVMHEALHNHYTQKSLSLSPGK

SEQ ID NO: 5691 - protein, 467 aa, synthetic construct
MGWSCIILFLVATATGVHSEVQLVESGGGLVQPGGSLRLSCAASGFTFSSYWMSWVRQAPGKGLEWVANIKQDGSEKYYVDSVKGRFTISRDNAKNSLYLQMNSLRAEDTAVYYCARDRLTGDLDYWGQGTLVTVSSASTKGPSVFPLAPSSKSTSGGTAALGCLVKDYFPEPVTVSWNSGALTSGVHTFPAVLQSSGLYSLSSVVTVPSSSLGTQTYICNVNHKPSNTKVDKKVEPKSCDKTHTCPPCPAPEAAGGPSVFLFPPKPKDTLMISRTPEVTCVVVDVSHEDPEVKFNWYVDGVEVHNAKTKPREEQYNSTYRVVSVLTVLHQDWLNGKEYKCKVSNKALGAPIEKTISKAKGQPREPQVYTLPPSREEMTKNQVSLTCLVKGFYPSDIAVEWESNGQPENNYKTTPPVLDSDGSFFLYSKLTVDKSRWQQGNVFSCSVMHEALHNHYTQKSLSLSPGK

SEQ ID NO: 5692 - protein, 468 aa, synthetic construct
MGWSCIILFLVATATGVHSEVQLVESGGGLVQPGGSLRLSCEASGFTFSRYWMHWVRQVPGKGLVWVSRINIVGSTIDYADSVKGRFTISRDNAKNTLYLQMDSLTAEDTAVYYCAREGDRSDAFAIWGQGTMVTVSSASTKGPSVFPLAPSSKSTSGGTAALGCLVKDYFPEPVTVSWNSGALTSGVHTFPAVLQSSGLYSLSSVVTVPSSSLGTQTYICNVNHKPSNTKVDKKVEPKSCDKTHTCPPCPAPEAAGGPSVFLFPPKPKDTLMISRTPEVTCVVVDVSHEDPEVKFNWYVDGVEVHNAKTKPREEQYNSTYRVVSVLTVLHQDWLNGKEYKCKVSNKALGAPIEKTISKAKGQPREPQVYTLPPSREEMTKNQVSLTCLVKGFYPSDIAVEWESNGQPENNYKTTPPVLDSDGSFFLYSKLTVDKSRWQQGNVFSCSVMHEALHNHYTQKSLSLSPGK

SEQ ID NO: 5693 - protein, 468 aa, synthetic construct
MGWSCIILFLVATATGVHSEVQLVESGGGLVKPGGSLRLSCAASGFTFSSYSMNWVRQAPGKGLEWVSSISSSSSYIYYADSVKGRFTISRDNAKNSLYLQMNSLRAEDTAVYYCARQQWLGYYFDYWGQGTLVTVSSASTKGPSVFPLAPSSKSTSGGTAALGCLVKDYFPEPVTVSWNSGALTSGVHTFPAVLQSSGLYSLSSVVTVPSSSLGTQTYICNVNHKPSNTKVDKKVEPKSCDKTHTCPPCPAPEAAGGPSVFLFPPKPKDTLMISRTPEVTCVVVDVSHEDPEVKFNWYVDGVEVHNAKTKPREEQYNSTYRVVSVLTVLHQDWLNGKEYKCKVSNKALGAPIEKTISKAKGQPREPQVYTLPPSREEMTKNQVSLTCLVKGFYPSDIAVEWESNGQPENNYKTTPPVLDSDGSFFLYSKLTVDKSRWQQGNVFSCSVMHEALHNHYTQKSLSLSPGK

SEQ ID NO: 5694 - protein, 468 aa, synthetic construct
MGWSCIILFLVATATGVHSEVQLVESGGGLVQPGGSLRLSCAASGFTFSIYWMSWVRQAPGKGLEWVATIKEDGSEKYYVDSVKGRFTISRDNAKNSLFLQMNSLRADDTAVYYCARDSNFLYYFDYWGQGTLVTVSSASTKGPSVFPLAPSSKSTSGGTAALGCLVKDYFPEPVTVSWNSGALTSGVHTFPAVLQSSGLYSLSSVVTVPSSSLGTQTYICNVNHKPSNTKVDKKVEPKSCDKTHTCPPCPAPEAAGGPSVFLFPPKPKDTLMISRTPEVTCVVVDVSHEDPEVKFNWYVDGVEVHNAKTKPREEQYNSTYRVVSVLTVLHQDWLNGKEYKCKVSNKALGAPIEKTISKAKGQPREPQVYTLPPSREEMTKNQVSLTCLVKGFYPSDIAVEWESNGQPENNYKTTPPVLDSDGSFFLYSKLTVDKSRWQQGNVFSCSVMHEALHNHYTQKSLSLSPGK

SEQ ID NO: 5695 - protein, 468 aa, synthetic construct
MGWSCIILFLVATATGVHSQVQLVQSGAEVKKPGASVKVSCKASGYTFTSYGISWVRQAPGQGLEWMGWISAYNGNTNYAQKLQGRVTMTTDTSTNTAYMELRSLRSDDTAVYYCARQITGTRGFDYWGQGTLVTVSSASTKGPSVFPLAPSSKSTSGGTAALGCLVKDYFPEPVTVSWNSGALTSGVHTFPAVLQSSGLYSLSSVVTVPSSSLGTQTYICNVNHKPSNTKVDKKVEPKSCDKTHTCPPCPAPEAAGGPSVFLFPPKPKDTLMISRTPEVTCVVVDVSHEDPEVKFNWYVDGVEVHNAKTKPREEQYNSTYRVVSVLTVLHQDWLNGKEYKCKVSNKALGAPIEKTISKAKGQPREPQVYTLPPSREEMTKNQVSLTCLVKGFYPSDIAVEWESNGQPENNYKTTPPVLDSDGSFFLYSKLTVDKSRWQQGNVFSCSVMHEALHNHYTQKSLSLSPGK

SEQ ID NO: 5696 - protein, 468 aa, synthetic construct
MGWSCIILFLVATATGVHSQVQLVQSGAEVKKPGASVKVSCKASGYTFTSYDINWVRQATGQGLEWMGWMNPNSGNTGYAQKFQGRVTMTRNTSISTAYMELSSLRSEDTAVYYCARMGYSNYPFDYWGQGTLVTVSSASTKGPSVFPLAPSSKSTSGGTAALGCLVKDYFPEPVTVSWNSGALTSGVHTFPAVLQSSGLYSLSSVVTVPSSSLGTQTYICNVNHKPSNTKVDKKVEPKSCDKTHTCPPCPAPEAAGGPSVFLFPPKPKDTLMISRTPEVTCVVVDVSHEDPEVKFNWYVDGVEVHNAKTKPREEQYNSTYRVVSVLTVLHQDWLNGKEYKCKVSNKALGAPIEKTISKAKGQPREPQVYTLPPSREEMTKNQVSLTCLVKGFYPSDIAVEWESNGQPENNYKTTPPVLDSDGSFFLYSKLTVDKSRWQQGNVFSCSVMHEALHNHYTQKSLSLSPGK

SEQ ID NO: 5697 - protein, 468 aa, synthetic construct
MGWSCIILFLVATATGVHSQVQLVQSGSEVKKPGASVKVSCKASGYTFTSYYMHWVRQAPGQGLEWMGIINPSGGSTSYAQKFQGRVTMTRDTSTSTVYMELSSLRSEDTAVYYCARGIPTTVTPDYWGQGTLVTVSSASTKGPSVFPLAPSSKSTSGGTAALGCLVKDYFPEPVTVSWNSGALTSGVHTFPAVLQSSGLYSLSSVVTVPSSSLGTQTYICNVNHKPSNTKVDKKVEPKSCDKTHTCPPCPAPEAAGGPSVFLFPPKPKDTLMISRTPEVTCVVVDVSHEDPEVKFNWYVDGVEVHNAKTKPREEQYNSTYRVVSVLTVLHQDWLNGKEYKCKVSNKALGAPIEKTISKAKGQPREPQVYTLPPSREEMTKNQVSLTCLVKGFYPSDIAVEWESNGQPENNYKTTPPVLDSDGSFFLYSKLTVDKSRWQQGNVFSCSVMHEALHNHYTQKSLSLSPGK

SEQ ID NO: 5698 - protein, 468 aa, synthetic construct
MGWSCIILFLVATATGVHSEVQLVESGGGLVQPGGSLRLSCAASGFTFSSYDMHWVRQATGKGLEWVSAIGTAGDTYYPGSVKGRFTISRENAKNSLYLQMNSLRAGDTAVYYCARAGLLTGDAFDIWGQGTMVTVSSASTKGPSVFPLAPSSKSTSGGTAALGCLVKDYFPEPVTVSWNSGALTSGVHTFPAVLQSSGLYSLSSVVTVPSSSLGTQTYICNVNHKPSNTKVDKKVEPKSCDKTHTCPPCPAPEAAGGPSVFLFPPKPKDTLMISRTPEVTCVVVDVSHEDPEVKFNWYVDGVEVHNAKTKPREEQYNSTYRVVSVLTVLHQDWLNGKEYKCKVSNKALGAPIEKTISKAKGQPREPQVYTLPPSREEMTKNQVSLTCLVKGFYPSDIAVEWESNGQPENNYKTTPPVLDSDGSFFLYSKLTVDKSRWQQGNVFSCSVMHEALHNHYTQKSLSLSPGK

SEQ ID NO: 5699 - protein, 468 aa, synthetic construct
MGWSCIILFLVATATGVHSEVQLVESGGGLVKPGGSLRLSCAASGFTFSNAWMSWVRQAPGKGLEWVGRIKSKTDGGTTDYAAPVKGRFTISRDDSKNTLYLQMNSLKTEDTAVYYCITGTTFPFDYWGQGTLVTVSSASTKGPSVFPLAPSSKSTSGGTAALGCLVKDYFPEPVTVSWNSGALTSGVHTFPAVLQSSGLYSLSSVVTVPSSSLGTQTYICNVNHKPSNTKVDKKVEPKSCDKTHTCPPCPAPEAAGGPSVFLFPPKPKDTLMISRTPEVTCVVVDVSHEDPEVKFNWYVDGVEVHNAKTKPREEQYNSTYRVVSVLTVLHQDWLNGKEYKCKVSNKALGAPIEKTISKAKGQPREPQVYTLPPSREEMTKNQVSLTCLVKGFYPSDIAVEWESNGQPENNYKTTPPVLDSDGSFFLYSKLTVDKSRWQQGNVFSCSVMHEALHNHYTQKSLSLSPGK

SEQ ID NO: 5700 - protein, 467 aa, synthetic construct
MGWSCIILFLVATATGVHSEVQLVESGEGLVQPGGSLRLSCAASGFTFSSHAMHWVRQAPGKGLEYVSAISSNGGNTYYADSVKGRFTISRDNSKNTLYLQVGSLRPEDMAIYYCTKGGVGASFDYWGQGTLVTVSSASTKGPSVFPLAPSSKSTSGGTAALGCLVKDYFPEPVTVSWNSGALTSGVHTFPAVLQSSGLYSLSSVVTVPSSSLGTQTYICNVNHKPSNTKVDKKVEPKSCDKTHTCPPCPAPEAAGGPSVFLFPPKPKDTLMISRTPEVTCVVVDVSHEDPEVKFNWYVDGVEVHNAKTKPREEQYNSTYRVVSVLTVLHQDWLNGKEYKCKVSNKALGAPIEKTISKAKGQPREPQVYTLPPSREEMTKNQVSLTCLVKGFYPSDIAVEWESNGQPENNYKTTPPVLDSDGSFFLYSKLTVDKSRWQQGNVFSCSVMHEALHNHYTQKSLSLSPGK

SEQ ID NO: 5701 - protein, 468 aa, synthetic construct
MGWSCIILFLVATATGVHSEVQLVESGGGLVKPGGSLRLSCAASGFTFSSYSMNWVRQAPGKGLEWVSSISSSSSYIYYADSVKGRFTISRDNAKNSLYLQMNSLRAEDTAVYYCARGDYSNYYFDYWGQGTLVTVSSASTKGPSVFPLAPSSKSTSGGTAALGCLVKDYFPEPVTVSWNSGALTSGVHTFPAVLQSSGLYSLSSVVTVPSSSLGTQTYICNVNHKPSNTKVDKKVEPKSCDKTHTCPPCPAPEAAGGPSVFLFPPKPKDTLMISRTPEVTCVVVDVSHEDPEVKFNWYVDGVEVHNAKTKPREEQYNSTYRVVSVLTVLHQDWLNGKEYKCKVSNKALGAPIEKTISKAKGQPREPQVYTLPPSREEMTKNQVSLTCLVKGFYPSDIAVEWESNGQPENNYKTTPPVLDSDGSFFLYSKLTVDKSRWQQGNVFSCSVMHEALHNHYTQKSLSLSPGK

SEQ ID NO: 5702 - protein, 461 aa, synthetic construct
MGWSCIILFLVATATGVHSQVQLQQWGAGLLKPSETLSLTCAVYGGSFSGYYWSWIRQPPGKGLEWIGEINHSGSTNYNPSLKSRVTISVDTSKNQFSLKLSSVTAADTAVYYCARWEQPWGQGTLVTVSSASTKGPSVFPLAPSSKSTSGGTAALGCLVKDYFPEPVTVSWNSGALTSGVHTFPAVLQSSGLYSLSSVVTVPSSSLGTQTYICNVNHKPSNTKVDKKVEPKSCDKTHTCPPCPAPEAAGGPSVFLFPPKPKDTLMISRTPEVTCVVVDVSHEDPEVKFNWYVDGVEVHNAKTKPREEQYNSTYRVVSVLTVLHQDWLNGKEYKCKVSNKALGAPIEKTISKAKGQPREPQVYTLPPSREEMTKNQVSLTCLVKGFYPSDIAVEWESNGQPENNYKTTPPVLDSDGSFFLYSKLTVDKSRWQQGNVFSCSVMHEALHNHYTQKSLSLSPGK

SEQ ID NO: 5703 - protein, 468 aa, synthetic construct
MGWSCIILFLVATATGVHSQVQLVQSGAEVKKPGASVKVSCKASGYTFTSYYMHWVRQAPGQGLEWMGIINPSGGSTSYAQKFQGRVTMTRDTSTSTVYMELSSLRSEDTAVYYCARRTGTTHYFDYWGQGTLVTVSSASTKGPSVFPLAPSSKSTSGGTAALGCLVKDYFPEPVTVSWNSGALTSGVHTFPAVLQSSGLYSLSSVVTVPSSSLGTQTYICNVNHKPSNTKVDKKVEPKSCDKTHTCPPCPAPEAAGGPSVFLFPPKPKDTLMISRTPEVTCVVVDVSHEDPEVKFNWYVDGVEVHNAKTKPREEQYNSTYRVVSVLTVLHQDWLNGKEYKCKVSNKALGAPIEKTISKAKGQPREPQVYTLPPSREEMTKNQVSLTCLVKGFYPSDIAVEWESNGQPENNYKTTPPVLDSDGSFFLYSKLTVDKSRWQQGNVFSCSVMHEALHNHYTQKSLSLSPGK

SEQ ID NO: 5704 - protein, 468 aa, synthetic construct
MGWSCIILFLVATATGVHSQVQLVESGGGLVKPGGSLRLSCAASGFTFSDYYMSWIRQAPGKGLEWVSYISSSGSTIYYADSVKGRFTISRDNAKNSLYLQMNSLRAEDTAVYYCARGLWLGLYFDYWGQGTLVTVSSASTKGPSVFPLAPSSKSTSGGTAALGCLVKDYFPEPVTVSWNSGALTSGVHTFPAVLQSSGLYSLSSVVTVPSSSLGTQTYICNVNHKPSNTKVDKKVEPKSCDKTHTCPPCPAPEAAGGPSVFLFPPKPKDTLMISRTPEVTCVVVDVSHEDPEVKFNWYVDGVEVHNAKTKPREEQYNSTYRVVSVLTVLHQDWLNGKEYKCKVSNKALGAPIEKTISKAKGQPREPQVYTLPPSREEMTKNQVSLTCLVKGFYPSDIAVEWESNGQPENNYKTTPPVLDSDGSFFLYSKLTVDKSRWQQGNVFSCSVMHEALHNHYTQKSLSLSPGK

SEQ ID NO: 5705 - protein, 468 aa, synthetic construct
MGWSCIILFLVATATGVHSEVQLVQSGAEVKKPGESLKISCKGSGYSFTSYWIGWVRQMPGKGLEWMGIIYPGDSDTRYSPSFQGQVTISADKSISTAYLQWSSLKASDTAMYYCARFLGSSYYFDYWGQGTLVTVSSASTKGPSVFPLAPSSKSTSGGTAALGCLVKDYFPEPVTVSWNSGALTSGVHTFPAVLQSSGLYSLSSVVTVPSSSLGTQTYICNVNHKPSNTKVDKKVEPKSCDKTHTCPPCPAPEAAGGPSVFLFPPKPKDTLMISRTPEVTCVVVDVSHEDPEVKFNWYVDGVEVHNAKTKPREEQYNSTYRVVSVLTVLHQDWLNGKEYKCKVSNKALGAPIEKTISKAKGQPREPQVYTLPPSREEMTKNQVSLTCLVKGFYPSDIAVEWESNGQPENNYKTTPPVLDSDGSFFLYSKLTVDKSRWQQGNVFSCSVMHEALHNHYTQKSLSLSPGK

SEQ ID NO: 5706 - protein, 468 aa, synthetic construct
MGWSCIILFLVATATGVHSEVQLVESGGGLVQPGGSLRLSCAASGFTFSSYSMNWVRQAPGKGLEWVSYISSSSSTIYYADSVKGRFTISRDNAKNSLYLQMNSLRDEDTAVYYCARGGAAAGAFDIWGQGTMVTVSSASTKGPSVFPLAPSSKSTSGGTAALGCLVKDYFPEPVTVSWNSGALTSGVHTFPAVLQSSGLYSLSSVVTVPSSSLGTQTYICNVNHKPSNTKVDKKVEPKSCDKTHTCPPCPAPEAAGGPSVFLFPPKPKDTLMISRTPEVTCVVVDVSHEDPEVKFNWYVDGVEVHNAKTKPREEQYNSTYRVVSVLTVLHQDWLNGKEYKCKVSNKALGAPIEKTISKAKGQPREPQVYTLPPSREEMTKNQVSLTCLVKGFYPSDIAVEWESNGQPENNYKTTPPVLDSDGSFFLYSKLTVDKSRWQQGNVFSCSVMHEALHNHYTQKSLSLSPGK

SEQ ID NO: 5707 - protein, 469 aa, synthetic construct
MGWSCIILFLVATATGVHSQVQLQESGPGLVKPSQTLSLTCTVSGGSISSGGYYWSWIRQHPGKGLEWIGYIFYSGSTYYNPSLKSRVTISVDTSKKQYSLKLRSVTAADTAVYYCARAEWELLWFDPWGQGTLVTVSSASTKGPSVFPLAPSSKSTSGGTAALGCLVKDYFPEPVTVSWNSGALTSGVHTFPAVLQSSGLYSLSSVVTVPSSSLGTQTYICNVNHKPSNTKVDKKVEPKSCDKTHTCPPCPAPEAAGGPSVFLFPPKPKDTLMISRTPEVTCVVVDVSHEDPEVKFNWYVDGVEVHNAKTKPREEQYNSTYRVVSVLTVLHQDWLNGKEYKCKVSNKALGAPIEKTISKAKGQPREPQVYTLPPSREEMTKNQVSLTCLVKGFYPSDIAVEWESNGQPENNYKTTPPVLDSDGSFFLYSKLTVDKSRWQQGNVFSCSVMHEALHNHYTQKSLSLSPGK

SEQ ID NO: 5708 - protein, 469 aa, synthetic construct
MGWSCIILFLVATATGVHSQITLKESGPTLVKPTQTLTLTCTFSGFSLSTSGVGVGWIRQPPGKALEWLALIYWNDDKRYSPSLKSRLTITKDTSKNQVVLTMTNMDPVDTATYFCAHNYFYISGYFYWGQGTLVTVSSASTKGPSVFPLAPSSKSTSGGTAALGCLVKDYFPEPVTVSWNSGALTSGVHTFPAVLQSSGLYSLSSVVTVPSSSLGTQTYICNVNHKPSNTKVDKKVEPKSCDKTHTCPPCPAPEAAGGPSVFLFPPKPKDTLMISRTPEVTCVVVDVSHEDPEVKFNWYVDGVEVHNAKTKPREEQYNSTYRVVSVLTVLHQDWLNGKEYKCKVSNKALGAPIEKTISKAKGQPREPQVYTLPPSREEMTKNQVSLTCLVKGFYPSDIAVEWESNGQPENNYKTTPPVLDSDGSFFLYSKLTVDKSRWQQGNVFSCSVMHEALHNHYTQKSLSLSPGK

SEQ ID NO: 5709 - protein, 469 aa, synthetic construct
MGWSCIILFLVATATGVHSQVQLVESGGGVVQPGRSLRLSCAASGFTFSSYGMHWVRQAPGKGLEWVAVISYDGSNKYYADSVKGRFTISRDNSKNTLYLQMNSLRAEDTAVYYCAKDPLRVVNYMDVWGKGTTVTVSSASTKGPSVFPLAPSSKSTSGGTAALGCLVKDYFPEPVTVSWNSGALTSGVHTFPAVLQSSGLYSLSSVVTVPSSSLGTQTYICNVNHKPSNTKVDKKVEPKSCDKTHTCPPCPAPEAAGGPSVFLFPPKPKDTLMISRTPEVTCVVVDVSHEDPEVKFNWYVDGVEVHNAKTKPREEQYNSTYRVVSVLTVLHQDWLNGKEYKCKVSNKALGAPIEKTISKAKGQPREPQVYTLPPSREEMTKNQVSLTCLVKGFYPSDIAVEWESNGQPENNYKTTPPVLDSDGSFFLYSKLTVDKSRWQQGNVFSCSVMHEALHNHYTQKSLSLSPGK

SEQ ID NO: 5710 - protein, 469 aa, synthetic construct
MGWSCIILFLVATATGVHSQITLKESGPTLVKPTQTLTLTCTFSGFSLSTSGVGVGWIRQPPGKALEWLALIYWSDDKRYSPSLKNRLTITKDTSKNQVVLTMTNMDPLATATYYCAQTGYNSWSFDYWGQGTLVTVSSASTKGPSVFPLAPSSKSTSGGTAALGCLVKDYFPEPVTVSWNSGALTSGVHTFPAVLQSSGLYSLSSVVTVPSSSLGTQTYICNVNHKPSNTKVDKKVEPKSCDKTHTCPPCPAPEAAGGPSVFLFPPKPKDTLMISRTPEVTCVVVDVSHEDPEVKFNWYVDGVEVHNAKTKPREEQYNSTYRVVSVLTVLHQDWLNGKEYKCKVSNKALGAPIEKTISKAKGQPREPQVYTLPPSREEMTKNQVSLTCLVKGFYPSDIAVEWESNGQPENNYKTTPPVLDSDGSFFLYSKLTVDKSRWQQGNVFSCSVMHEALHNHYTQKSLSLSPGK

SEQ ID NO: 5711 - protein, 469 aa, synthetic construct
MGWSCIILFLVATATGVHSQVQLVQSGAEVKKPGASVKVSCKASGYPFTSYGINWVRQAPGQGLEWMGWISAYNSNTNYAEKFQGRVTMTTDTSTTTAYMDLRSLRSDDTAVYYCAREDAWNYGWFDPWGQGTLVTVSSASTKGPSVFPLAPSSKSTSGGTAALGCLVKDYFPEPVTVSWNSGALTSGVHTFPAVLQSSGLYSLSSVVTVPSSSLGTQTYICNVNHKPSNTKVDKKVEPKSCDKTHTCPPCPAPEAAGGPSVFLFPPKPKDTLMISRTPEVTCVVVDVSHEDPEVKFNWYVDGVEVHNAKTKPREEQYNSTYRVVSVLTVLHQDWLNGKEYKCKVSNKALGAPIEKTISKAKGQPREPQVYTLPPSREEMTKNQVSLTCLVKGFYPSDIAVEWESNGQPENNYKTTPPVLDSDGSFFLYSKLTVDKSRWQQGNVFSCSVMHEALHNHYTQKSLSLSPGK

SEQ ID NO: 5712 - protein, 469 aa, synthetic construct
MGWSCIILFLVATATGVHSQVQLVQSGAEVKKPGASVKVSCKASGYSFTGYDISWVRQAPRQGLEWMGWISAYNGNTNYAQKFQARVTMTTDTSTSTAYMELRSLRSDDTAVYYCAREILWLGGYFDYWGQGTLVTVSSASTKGPSVFPLAPSSKSTSGGTAALGCLVKDYFPEPVTVSWNSGALTSGVHTFPAVLQSSGLYSLSSVVTVPSSSLGTQTYICNVNHKPSNTKVDKKVEPKSCDKTHTCPPCPAPEAAGGPSVFLFPPKPKDTLMISRTPEVTCVVVDVSHEDPEVKFNWYVDGVEVHNAKTKPREEQYNSTYRVVSVLTVLHQDWLNGKEYKCKVSNKALGAPIEKTISKAKGQPREPQVYTLPPSREEMTKNQVSLTCLVKGFYPSDIAVEWESNGQPENNYKTTPPVLDSDGSFFLYSKLTVDKSRWQQGNVFSCSVMHEALHNHYTQKSLSLSPGK

SEQ ID NO: 5713 - protein, 469 aa, synthetic construct
MGWSCIILFLVATATGVHSQVQLVQSGSELKKPGASVKVSCKASGYTFSSYDMNWIRQAPGQGLEWMGWINTNTGNPTYAQGFTGRFVFSLDTSVSTAYLQISSLKAEDTAVYYCAREYSSGWYYFDYWGQGTLVTVSSASTKGPSVFPLAPSSKSTSGGTAALGCLVKDYFPEPVTVSWNSGALTSGVHTFPAVLQSSGLYSLSSVVTVPSSSLGTQTYICNVNHKPSNTKVDKKVEPKSCDKTHTCPPCPAPEAAGGPSVFLFPPKPKDTLMISRTPEVTCVVVDVSHEDPEVKFNWYVDGVEVHNAKTKPREEQYNSTYRVVSVLTVLHQDWLNGKEYKCKVSNKALGAPIEKTISKAKGQPREPQVYTLPPSREEMTKNQVSLTCLVKGFYPSDIAVEWESNGQPENNYKTTPPVLDSDGSFFLYSKLTVDKSRWQQGNVFSCSVMHEALHNHYTQKSLSLSPGK

SEQ ID NO: 5714 - protein, 469 aa, synthetic construct
MGWSCIILFLVATATGVHSQVQLVQSGAEVKKPGASVKVSCKASGYTFTGYYMHWVRQAPGQGLEWMGWINPNSGGTNYAQKFQGRVTMTRDTSISTAYMELSRLRSDDTAVYYCARERIAVAPPFDYWGQGTLVTVSSASTKGPSVFPLAPSSKSTSGGTAALGCLVKDYFPEPVTVSWNSGALTSGVHTFPAVLQSSGLYSLSSVVTVPSSSLGTQTYICNVNHKPSNTKVDKKVEPKSCDKTHTCPPCPAPEAAGGPSVFLFPPKPKDTLMISRTPEVTCVVVDVSHEDPEVKFNWYVDGVEVHNAKTKPREEQYNSTYRVVSVLTVLHQDWLNGKEYKCKVSNKALGAPIEKTISKAKGQPREPQVYTLPPSREEMTKNQVSLTCLVKGFYPSDIAVEWESNGQPENNYKTTPPVLDSDGSFFLYSKLTVDKSRWQQGNVFSCSVMHEALHNHYTQKSLSLSPGK

SEQ ID NO: 5715 - protein, 469 aa, synthetic construct
MGWSCIILFLVATATGVHSQVQLVQSGAEVKKPGASVKVSCKASGYTFTSYDINWVRQATGQGLEWMGWMNPNSGNTGYAQKFQGRVTMTRNTSISTAYMELSSLRSEDTAVYYCARAGWELPEYFQHWGQGTLVTVSSASTKGPSVFPLAPSSKSTSGGTAALGCLVKDYFPEPVTVSWNSGALTSGVHTFPAVLQSSGLYSLSSVVTVPSSSLGTQTYICNVNHKPSNTKVDKKVEPKSCDKTHTCPPCPAPEAAGGPSVFLFPPKPKDTLMISRTPEVTCVVVDVSHEDPEVKFNWYVDGVEVHNAKTKPREEQYNSTYRVVSVLTVLHQDWLNGKEYKCKVSNKALGAPIEKTISKAKGQPREPQVYTLPPSREEMTKNQVSLTCLVKGFYPSDIAVEWESNGQPENNYKTTPPVLDSDGSFFLYSKLTVDKSRWQQGNVFSCSVMHEALHNHYTQKSLSLSPGK

SEQ ID NO: 5716 - protein, 469 aa, synthetic construct
MGWSCIILFLVATATGVHSQVQLVQSGAEVKKPGASVKVSCKASGYTFTSYDINWVRQATGQGLEWMGWMNPNSGNTGYAQKFQGRVTMTRNTSISTAYMELSSLRSEDTAVYYCARGGDDYSNLFDYWGQGTLVTVSSASTKGPSVFPLAPSSKSTSGGTAALGCLVKDYFPEPVTVSWNSGALTSGVHTFPAVLQSSGLYSLSSVVTVPSSSLGTQTYICNVNHKPSNTKVDKKVEPKSCDKTHTCPPCPAPEAAGGPSVFLFPPKPKDTLMISRTPEVTCVVVDVSHEDPEVKFNWYVDGVEVHNAKTKPREEQYNSTYRVVSVLTVLHQDWLNGKEYKCKVSNKALGAPIEKTISKAKGQPREPQVYTLPPSREEMTKNQVSLTCLVKGFYPSDIAVEWESNGQPENNYKTTPPVLDSDGSFFLYSKLTVDKSRWQQGNVFSCSVMHEALHNHYTQKSLSLSPGK

SEQ ID NO: 5717 - protein, 469 aa, synthetic construct
MGWSCIILFLVATATGVHSQVQLVQSGAEVKKPGSSVKVPCKASGDTFSNFAINWVRQAPGQGLEWMGGIIPIFATANYAQNFQGRVTITADESTSAAYMEVSSLRFEDTAVYYCARTPLGIGRSFDLWGQGTMVTVSSASTKGPSVFPLAPSSKSTSGGTAALGCLVKDYFPEPVTVSWNSGALTSGVHTFPAVLQSSGLYSLSSVVTVPSSSLGTQTYICNVNHKPSNTKVDKKVEPKSCDKTHTCPPCPAPEAAGGPSVFLFPPKPKDTLMISRTPEVTCVVVDVSHEDPEVKFNWYVDGVEVHNAKTKPREEQYNSTYRVVSVLTVLHQDWLNGKEYKCKVSNKALGAPIEKTISKAKGQPREPQVYTLPPSREEMTKNQVSLTCLVKGFYPSDIAVEWESNGQPENNYKTTPPVLDSDGSFFLYSKLTVDKSRWQQGNVFSCSVMHEALHNHYTQKSLSLSPGK

SEQ ID NO: 5718 - protein, 469 aa, synthetic construct
MGWSCIILFLVATATGVHSEVQLVESGGGLVKPGGSLRLSCAASGFTFSNAWMSWVRQAPGKGLEWVGRIKRKTDGGTTDFASPVKGRFTISRDDSNNTLYLQMNSLKTEDTAVYYCTTASTVTTGDYWGQGTLVTVSSASTKGPSVFPLAPSSKSTSGGTAALGCLVKDYFPEPVTVSWNSGALTSGVHTFPAVLQSSGLYSLSSVVTVPSSSLGTQTYICNVNHKPSNTKVDKKVEPKSCDKTHTCPPCPAPEAAGGPSVFLFPPKPKDTLMISRTPEVTCVVVDVSHEDPEVKFNWYVDGVEVHNAKTKPREEQYNSTYRVVSVLTVLHQDWLNGKEYKCKVSNKALGAPIEKTISKAKGQPREPQVYTLPPSREEMTKNQVSLTCLVKGFYPSDIAVEWESNGQPENNYKTTPPVLDSDGSFFLYSKLTVDKSRWQQGNVFSCSVMHEALHNHYTQKSLSLSPGK

SEQ ID NO: 5719 - protein, 468 aa, synthetic construct
MGWSCIILFLVATATGVHSQVQLQQSGPGLVKPSQTLSLTCAISGDSVSSNSAAWNWIRQSPSRGLEWLGRTYYRSKWYNDYAVSVKSRITINPDTSKNQFSLQLNSVTPEDTAVYYCARERTEIDYWGQGTLVTVSSASTKGPSVFPLAPSSKSTSGGTAALGCLVKDYFPEPVTVSWNSGALTSGVHTFPAVLQSSGLYSLSSVVTVPSSSLGTQTYICNVNHKPSNTKVDKKVEPKSCDKTHTCPPCPAPEAAGGPSVFLFPPKPKDTLMISRTPEVTCVVVDVSHEDPEVKFNWYVDGVEVHNAKTKPREEQYNSTYRVVSVLTVLHQDWLNGKEYKCKVSNKALGAPIEKTISKAKGQPREPQVYTLPPSREEMTKNQVSLTCLVKGFYPSDIAVEWESNGQPENNYKTTPPVLDSDGSFFLYSKLTVDKSRWQQGNVFSCSVMHEALHNHYTQKSLSLSPGK

SEQ ID NO: 5720 - protein, 469 aa, synthetic construct
MGWSCIILFLVATATGVHSEVQLVESGGGLVKPGGSLRLSCAASGFTFNNAWMIWVRQAPGKGLEWVGRIKSKTDGGTTDYGAPVKGRFTISRDDSKNTLYLQMNSLKTEDTAVYYCTTGRYFDWFDYWGQGTLVTVSSASTKGPSVFPLAPSSKSTSGGTAALGCLVKDYFPEPVTVSWNSGALTSGVHTFPAVLQSSGLYSLSSVVTVPSSSLGTQTYICNVNHKPSNTKVDKKVEPKSCDKTHTCPPCPAPEAAGGPSVFLFPPKPKDTLMISRTPEVTCVVVDVSHEDPEVKFNWYVDGVEVHNAKTKPREEQYNSTYRVVSVLTVLHQDWLNGKEYKCKVSNKALGAPIEKTISKAKGQPREPQVYTLPPSREEMTKNQVSLTCLVKGFYPSDIAVEWESNGQPENNYKTTPPVLDSDGSFFLYSKLTVDKSRWQQGNVFSCSVMHEALHNHYTQKSLSLSPGK

SEQ ID NO: 5721 - protein, 469 aa, synthetic construct
MGWSCIILFLVATATGVHSEVQLVESGGGLVKPGGSLRLSCAASGFTFSNAWMSWVRQAPGKGLEWVGRIKSKTDGGTTDYAAPVKGRFTISRDDSKNTLYLQMNSLKTEDTAVYYCTTASGSYWFDPWGQGTLVTVSSASTKGPSVFPLAPSSKSTSGGTAALGCLVKDYFPEPVTVSWNSGALTSGVHTFPAVLQSSGLYSLSSVVTVPSSSLGTQTYICNVNHKPSNTKVDKKVEPKSCDKTHTCPPCPAPEAAGGPSVFLFPPKPKDTLMISRTPEVTCVVVDVSHEDPEVKFNWYVDGVEVHNAKTKPREEQYNSTYRVVSVLTVLHQDWLNGKEYKCKVSNKALGAPIEKTISKAKGQPREPQVYTLPPSREEMTKNQVSLTCLVKGFYPSDIAVEWESNGQPENNYKTTPPVLDSDGSFFLYSKLTVDKSRWQQGNVFSCSVMHEALHNHYTQKSLSLSPGK

SEQ ID NO: 5722 - protein, 469 aa, synthetic construct
MGWSCIILFLVATATGVHSQVQLVESGGGVVQPGRSLRLSCAASGFTFSSYGMHWVRQAPGKGLEWVAVISYDGSNKYYADSVKGRFTISRDNSKNTLYLQMNSLRAEDTAVYYCAKGNWNYGDAFDIWGQGTMVTVSSASTKGPSVFPLAPSSKSTSGGTAALGCLVKDYFPEPVTVSWNSGALTSGVHTFPAVLQSSGLYSLSSVVTVPSSSLGTQTYICNVNHKPSNTKVDKKVEPKSCDKTHTCPPCPAPEAAGGPSVFLFPPKPKDTLMISRTPEVTCVVVDVSHEDPEVKFNWYVDGVEVHNAKTKPREEQYNSTYRVVSVLTVLHQDWLNGKEYKCKVSNKALGAPIEKTISKAKGQPREPQVYTLPPSREEMTKNQVSLTCLVKGFYPSDIAVEWESNGQPENNYKTTPPVLDSDGSFFLYSKLTVDKSRWQQGNVFSCSVMHEALHNHYTQKSLSLSPGK

SEQ ID NO: 5723 - protein, 469 aa, synthetic construct
MGWSCIILFLVATATGVHSQVQLVESGGGVVRPGGSLRLSCAASGFTFDDYGMSWVRQAPGKGLEWVSGINWNGGSTGYADSVKGRFTISRDNAKNSLYLQMNSLRAEDTALYYCARENYDFWSGFDPWGQGTLVTVSSASTKGPSVFPLAPSSKSTSGGTAALGCLVKDYFPEPVTVSWNSGALTSGVHTFPAVLQSSGLYSLSSVVTVPSSSLGTQTYICNVNHKPSNTKVDKKVEPKSCDKTHTCPPCPAPEAAGGPSVFLFPPKPKDTLMISRTPEVTCVVVDVSHEDPEVKFNWYVDGVEVHNAKTKPREEQYNSTYRVVSVLTVLHQDWLNGKEYKCKVSNKALGAPIEKTISKAKGQPREPQVYTLPPSREEMTKNQVSLTCLVKGFYPSDIAVEWESNGQPENNYKTTPPVLDSDGSFFLYSKLTVDKSRWQQGNVFSCSVMHEALHNHYTQKSLSLSPGK

SEQ ID NO: 5724 - protein, 468 aa, synthetic construct
MGWSCIILFLVATATGVHSQVQLQQSGPGLVKPSQTLSLTCAISGDSVSSNSAAWNWIRQSPSRGLEWLGRTYYRSKWYNGYAESVKSRITINPDTSKNQFSLQLNSVTPEDTAVYYCAREDRGFDYWGQGTLVTVSSASTKGPSVFPLAPSSKSTSGGTAALGCLVKDYFPEPVTVSWNSGALTSGVHTFPAVLQSSGLYSLSSVVTVPSSSLGTQTYICNVNHKPSNTKVDKKVEPKSCDKTHTCPPCPAPEAAGGPSVFLFPPKPKDTLMISRTPEVTCVVVDVSHEDPEVKFNWYVDGVEVHNAKTKPREEQYNSTYRVVSVLTVLHQDWLNGKEYKCKVSNKALGAPIEKTISKAKGQPREPQVYTLPPSREEMTKNQVSLTCLVKGFYPSDIAVEWESNGQPENNYKTTPPVLDSDGSFFLYSKLTVDKSRWQQGNVFSCSVMHEALHNHYTQKSLSLSPGK

SEQ ID NO: 5725 - protein, 469 aa, synthetic construct
MGWSCIILFLVATATGVHSEVQLVESGGGLVQPGRSLRLSCAASGFTFDDYAMHWVRQAPGKGLEWVSGISWNSGSIGYADSVKGRFTISRDNAKNSLYLQMNSLRAEDTALYYCAKRAVVTDYYMDVWGKGTTVTVSSASTKGPSVFPLAPSSKSTSGGTAALGCLVKDYFPEPVTVSWNSGALTSGVHTFPAVLQSSGLYSLSSVVTVPSSSLGTQTYICNVNHKPSNTKVDKKVEPKSCDKTHTCPPCPAPEAAGGPSVFLFPPKPKDTLMISRTPEVTCVVVDVSHEDPEVKFNWYVDGVEVHNAKTKPREEQYNSTYRVVSVLTVLHQDWLNGKEYKCKVSNKALGAPIEKTISKAKGQPREPQVYTLPPSREEMTKNQVSLTCLVKGFYPSDIAVEWESNGQPENNYKTTPPVLDSDGSFFLYSKLTVDKSRWQQGNVFSCSVMHEALHNHYTQKSLSLSPGK

SEQ ID NO: 5726 - protein, 469 aa, synthetic construct
MGWSCIILFLVATATGVHSEVQLVESGGGLVQPGGSLRLSCAASGFTFSSYSMNWVRQAPGKGLEWVSYISSSSNTIYYADSVKGRFTISRDNAKNSLYLQMSSLRDEDTAVYYCARTSSWSYDAFDIWGQGTMVTVSSASTKGPSVFPLAPSSKSTSGGTAALGCLVKDYFPEPVTVSWNSGALTSGVHTFPAVLQSSGLYSLSSVVTVPSSSLGTQTYICNVNHKPSNTKVDKKVEPKSCDKTHTCPPCPAPEAAGGPSVFLFPPKPKDTLMISRTPEVTCVVVDVSHEDPEVKFNWYVDGVEVHNAKTKPREEQYNSTYRVVSVLTVLHQDWLNGKEYKCKVSNKALGAPIEKTISKAKGQPREPQVYTLPPSREEMTKNQVSLTCLVKGFYPSDIAVEWESNGQPENNYKTTPPVLDSDGSFFLYSKLTVDKSRWQQGNVFSCSVMHEALHNHYTQKSLSLSPGK

SEQ ID NO: 5727 - protein, 470 aa, synthetic construct
MGWSCIILFLVATATGVHSQVQLVQSGAEVKKPGASVKVSCKASGYTFTSYYMHWVRQAPGQGLEWMGIINPSGGSTSYAQKFQGRVTMTRDTSTSTVYMELSSLRSEDTAVYYCARERGHTVTPYFDYWGQGTLVTVSSASTKGPSVFPLAPSSKSTSGGTAALGCLVKDYFPEPVTVSWNSGALTSGVHTFPAVLQSSGLYSLSSVVTVPSSSLGTQTYICNVNHKPSNTKVDKKVEPKSCDKTHTCPPCPAPEAAGGPSVFLFPPKPKDTLMISRTPEVTCVVVDVSHEDPEVKFNWYVDGVEVHNAKTKPREEQYNSTYRVVSVLTVLHQDWLNGKEYKCKVSNKALGAPIEKTISKAKGQPREPQVYTLPPSREEMTKNQVSLTCLVKGFYPSDIAVEWESNGQPENNYKTTPPVLDSDGSFFLYSKLTVDKSRWQQGNVFSCSVMHEALHNHYTQKSLSLSPGK

SEQ ID NO: 5728 - protein, 470 aa, synthetic construct
MGWSCIILFLVATATGVHSEVQLVESGGGLVQPGGSLRLSCAASGFNFSSYNMNWVRQTPGKGLEWVSYISNTGNTIYYVDSVKGRFTISRDNAKNSLYLQLNSLRDEDTAVYFCARDGPQVGATDFDYWGQGTLVTVSSASTKGPSVFPLAPSSKSTSGGTAALGCLVKDYFPEPVTVSWNSGALTSGVHTFPAVLQSSGLYSLSSVVTVPSSSLGTQTYICNVNHKPSNTKVDKKVEPKSCDKTHTCPPCPAPEAAGGPSVFLFPPKPKDTLMISRTPEVTCVVVDVSHEDPEVKFNWYVDGVEVHNAKTKPREEQYNSTYRVVSVLTVLHQDWLNGKEYKCKVSNKALGAPIEKTISKAKGQPREPQVYTLPPSREEMTKNQVSLTCLVKGFYPSDIAVEWESNGQPENNYKTTPPVLDSDGSFFLYSKLTVDKSRWQQGNVFSCSVMHEALHNHYTQKSLSLSPGK

SEQ ID NO: 5729 - protein, 470 aa, synthetic construct
MGWSCIILFLVATATGVHSEVQLVESGGGLVKPGGSLRLSCAASGFTFSNAWMSWVRQAPGKGLEWVGRIKRKTDGGTTDYAAPVKGRFTISRDDSKNTLYLQMNSLKTEDTAVYYCTTEYSSSENFDYWGQGTLVTVSSASTKGPSVFPLAPSSKSTSGGTAALGCLVKDYFPEPVTVSWNSGALTSGVHTFPAVLQSSGLYSLSSVVTVPSSSLGTQTYICNVNHKPSNTKVDKKVEPKSCDKTHTCPPCPAPEAAGGPSVFLFPPKPKDTLMISRTPEVTCVVVDVSHEDPEVKFNWYVDGVEVHNAKTKPREEQYNSTYRVVSVLTVLHQDWLNGKEYKCKVSNKALGAPIEKTISKAKGQPREPQVYTLPPSREEMTKNQVSLTCLVKGFYPSDIAVEWESNGQPENNYKTTPPVLDSDGSFFLYSKLTVDKSRWQQGNVFSCSVMHEALHNHYTQKSLSLSPGK

SEQ ID NO: 5730 - protein, 470 aa, synthetic construct
MGWSCIILFLVATATGVHSEVQLVESGGGLVQPGGSLRLSCAASGFTFSSYWMHWVRQAPGKGLVWVSRINSDGSSTSYADSVKGRFTISRDNAKNTLYLQMNSLRAEDTAVYYCARDLGAARPRGFDYWGQGTLVTVSSASTKGPSVFPLAPSSKSTSGGTAALGCLVKDYFPEPVTVSWNSGALTSGVHTFPAVLQSSGLYSLSSVVTVPSSSLGTQTYICNVNHKPSNTKVDKKVEPKSCDKTHTCPPCPAPEAAGGPSVFLFPPKPKDTLMISRTPEVTCVVVDVSHEDPEVKFNWYVDGVEVHNAKTKPREEQYNSTYRVVSVLTVLHQDWLNGKEYKCKVSNKALGAPIEKTISKAKGQPREPQVYTLPPSREEMTKNQVSLTCLVKGFYPSDIAVEWESNGQPENNYKTTPPVLDSDGSFFLYSKLTVDKSRWQQGNVFSCSVMHEALHNHYTQKSLSLSPGK

SEQ ID NO: 5731 - protein, 470 aa, synthetic construct
MGWSCIILFLVATATGVHSEVQLVESGGGLVQPGGSLRLSCAASGFTFSSYAMSWVRQAPGKGLEWVSAISGSGGSTYYADSVKGRFTISRDNSKNTLYLQMNSLRAEDTAVYYCAKEGDSGYDSAFDIWGQGTMVTVSSASTKGPSVFPLAPSSKSTSGGTAALGCLVKDYFPEPVTVSWNSGALTSGVHTFPAVLQSSGLYSLSSVVTVPSSSLGTQTYICNVNHKPSNTKVDKKVEPKSCDKTHTCPPCPAPEAAGGPSVFLFPPKPKDTLMISRTPEVTCVVVDVSHEDPEVKFNWYVDGVEVHNAKTKPREEQYNSTYRVVSVLTVLHQDWLNGKEYKCKVSNKALGAPIEKTISKAKGQPREPQVYTLPPSREEMTKNQVSLTCLVKGFYPSDIAVEWESNGQPENNYKTTPPVLDSDGSFFLYSKLTVDKSRWQQGNVFSCSVMHEALHNHYTQKSLSLSPGK

SEQ ID NO: 5732 - protein, 470 aa, synthetic construct
MGWSCIILFLVATATGVHSQVQLQESGPGLVKPSGTLSLTCAVSGGSISSNNWWSWVRQPPGKGLEWIGEIYHSGSTNYNPSLKSRVTISVDKSKNQFSLKLSSVTAADTAVYYCARVLNWNYGDAFDIWGQGTMVTVSSASTKGPSVFPLAPSSKSTSGGTAALGCLVKDYFPEPVTVSWNSGALTSGVHTFPAVLQSSGLYSLSSVVTVPSSSLGTQTYICNVNHKPSNTKVDKKVEPKSCDKTHTCPPCPAPEAAGGPSVFLFPPKPKDTLMISRTPEVTCVVVDVSHEDPEVKFNWYVDGVEVHNAKTKPREEQYNSTYRVVSVLTVLHQDWLNGKEYKCKVSNKALGAPIEKTISKAKGQPREPQVYTLPPSREEMTKNQVSLTCLVKGFYPSDIAVEWESNGQPENNYKTTPPVLDSDGSFFLYSKLTVDKSRWQQGNVFSCSVMHEALHNHYTQKSLSLSPGK

SEQ ID NO: 5733 - protein, 470 aa, synthetic construct
MGWSCIILFLVATATGVHSQVQLQESGPGLVKPSGTLSLTCAVSGGSISSSNWWSWVRQPPGKGLEWIGEIYHSGSTNYNPSLKSRVTISVDKSKNQFSLKLSSVTAADTAVYYCARDPSIVGATAFDIWGQGTMVTVSSASTKGPSVFPLAPSSKSTSGGTAALGCLVKDYFPEPVTVSWNSGALTSGVHTFPAVLQSSGLYSLSSVVTVPSSSLGTQTYICNVNHKPSNTKVDKKVEPKSCDKTHTCPPCPAPEAAGGPSVFLFPPKPKDTLMISRTPEVTCVVVDVSHEDPEVKFNWYVDGVEVHNAKTKPREEQYNSTYRVVSVLTVLHQDWLNGKEYKCKVSNKALGAPIEKTISKAKGQPREPQVYTLPPSREEMTKNQVSLTCLVKGFYPSDIAVEWESNGQPENNYKTTPPVLDSDGSFFLYSKLTVDKSRWQQGNVFSCSVMHEALHNHYTQKSLSLSPGK

SEQ ID NO: 5734 - protein, 470 aa, synthetic construct
MGWSCIILFLVATATGVHSQVQLQESGPGLVKPSGTLSLTCAVSGGSIISSNWWSWVRQSPGKGLGWIGEIYHSGSTTYNPSLKSRVTISVDKSKNQFSLKLSSVTAADTALYYCARSHIVGVNGGFDYWGQGTLVTVSSASTKGPSVFPLAPSSKSTSGGTAALGCLVKDYFPEPVTVSWNSGALTSGVHTFPAVLQSSGLYSLSSVVTVPSSSLGTQTYICNVNHKPSNTKVDKKVEPKSCDKTHTCPPCPAPEAAGGPSVFLFPPKPKDTLMISRTPEVTCVVVDVSHEDPEVKFNWYVDGVEVHNAKTKPREEQYNSTYRVVSVLTVLHQDWLNGKEYKCKVSNKALGAPIEKTISKAKGQPREPQVYTLPPSREEMTKNQVSLTCLVKGFYPSDIAVEWESNGQPENNYKTTPPVLDSDGSFFLYSKLTVDKSRWQQGNVFSCSVMHEALHNHYTQKSLSLSPGK

SEQ ID NO: 5735 - protein, 470 aa, synthetic construct
MGWSCIILFLVATATGVHSEVQLVESGGGLVKPGGSLRLSCAASGFTFSSYSMNWVRQAPGKGLEWVSSISSSSSYIYYADSVKGRFTISRDNAKNSLYLQMNSLRAEDTAVYYCARDRYNWNYRAFDIWGQGTMVTVSSASTKGPSVFPLAPSSKSTSGGTAALGCLVKDYFPEPVTVSWNSGALTSGVHTFPAVLQSSGLYSLSSVVTVPSSSLGTQTYICNVNHKPSNTKVDKKVEPKSCDKTHTCPPCPAPEAAGGPSVFLFPPKPKDTLMISRTPEVTCVVVDVSHEDPEVKFNWYVDGVEVHNAKTKPREEQYNSTYRVVSVLTVLHQDWLNGKEYKCKVSNKALGAPIEKTISKAKGQPREPQVYTLPPSREEMTKNQVSLTCLVKGFYPSDIAVEWESNGQPENNYKTTPPVLDSDGSFFLYSKLTVDKSRWQQGNVFSCSVMHEALHNHYTQKSLSLSPGK

SEQ ID NO: 5736 - protein, 470 aa, synthetic construct
MGWSCIILFLVATATGVHSEVQLVESGGGLVQPGGSLRLSCAASGFTFSSYWMSWVRQAPGKGLEWVANIKQDGSEKYYVDSVKGRFTISRDNAKNSLYLQMNSLRAEDTAVYYCARDLGRGTISWFDPWGQGTLVTVSSASTKGPSVFPLAPSSKSTSGGTAALGCLVKDYFPEPVTVSWNSGALTSGVHTFPAVLQSSGLYSLSSVVTVPSSSLGTQTYICNVNHKPSNTKVDKKVEPKSCDKTHTCPPCPAPEAAGGPSVFLFPPKPKDTLMISRTPEVTCVVVDVSHEDPEVKFNWYVDGVEVHNAKTKPREEQYNSTYRVVSVLTVLHQDWLNGKEYKCKVSNKALGAPIEKTISKAKGQPREPQVYTLPPSREEMTKNQVSLTCLVKGFYPSDIAVEWESNGQPENNYKTTPPVLDSDGSFFLYSKLTVDKSRWQQGNVFSCSVMHEALHNHYTQKSLSLSPGK

SEQ ID NO: 5737 - protein, 470 aa, synthetic construct
MGWSCIILFLVATATGVHSQITLKESGPTLVKATQTLTLTCTFSGFSLNSSGVGVVWIRQPPGKALEWLALIYWNGDKRYSQSLKNRLTITEDTSKNQVVLAMTNMDPVDTATYYCTQTGYDSRWSFAYWGQGTLVTVSSASTKGPSVFPLAPSSKSTSGGTAALGCLVKDYFPEPVTVSWNSGALTSGVHTFPAVLQSSGLYSLSSVVTVPSSSLGTQTYICNVNHKPSNTKVDKKVEPKSCDKTHTCPPCPAPEAAGGPSVFLFPPKPKDTLMISRTPEVTCVVVDVSHEDPEVKFNWYVDGVEVHNAKTKPREEQYNSTYRVVSVLTVLHQDWLNGKEYKCKVSNKALGAPIEKTISKAKGQPREPQVYTLPPSREEMTKNQVSLTCLVKGFYPSDIAVEWESNGQPENNYKTTPPVLDSDGSFFLYSKLTVDKSRWQQGNVFSCSVMHEALHNHYTQKSLSLSPGK

SEQ ID NO: 5738 - protein, 470 aa, synthetic construct
MGWSCIILFLVATATGVHSQVQLVQSGAEVKKPGASVKVSCKTSGYIFMNYGITWVRHAPGQGLEWMGWISAYNGNTNYAQKVQGRVTMTTDTSTSTANMELRSLRSDDTAVYYCAREGQWRGRGWFALWGQGTTVTVSSASTKGPSVFPLAPSSKSTSGGTAALGCLVKDYFPEPVTVSWNSGALTSGVHTFPAVLQSSGLYSLSSVVTVPSSSLGTQTYICNVNHKPSNTKVDKKVEPKSCDKTHTCPPCPAPEAAGGPSVFLFPPKPKDTLMISRTPEVTCVVVDVSHEDPEVKFNWYVDGVEVHNAKTKPREEQYNSTYRVVSVLTVLHQDWLNGKEYKCKVSNKALGAPIEKTISKAKGQPREPQVYTLPPSREEMTKNQVSLTCLVKGFYPSDIAVEWESNGQPENNYKTTPPVLDSDGSFFLYSKLTVDKSRWQQGNVFSCSVMHEALHNHYTQKSLSLSPGK

SEQ ID NO: 5739 - protein, 470 aa, synthetic construct
MGWSCIILFLVATATGVHSQVQLVQSGSELKKPGASVKVSCKASGYTFTNYAMNWVRQAPGQGLEWMGWINTNTGKPTYAQGFTGRFVFSLDTSVSTAHLQISGLKAEDTAVYYCARERYFEDFHYMDVWGKGTTVTVSSASTKGPSVFPLAPSSKSTSGGTAALGCLVKDYFPEPVTVSWNSGALTSGVHTFPAVLQSSGLYSLSSVVTVPSSSLGTQTYICNVNHKPSNTKVDKKVEPKSCDKTHTCPPCPAPEAAGGPSVFLFPPKPKDTLMISRTPEVTCVVVDVSHEDPEVKFNWYVDGVEVHNAKTKPREEQYNSTYRVVSVLTVLHQDWLNGKEYKCKVSNKALGAPIEKTISKAKGQPREPQVYTLPPSREEMTKNQVSLTCLVKGFYPSDIAVEWESNGQPENNYKTTPPVLDSDGSFFLYSKLTVDKSRWQQGNVFSCSVMHEALHNHYTQKSLSLSPGK

SEQ ID NO: 5740 - protein, 470 aa, synthetic construct
MGWSCIILFLVATATGVHSQVQLVQSGAEVKKPGASVKVSCKASGYTFTDNYIHWVRRAPGQGLEWMGWLNPNSGGTNFAQKFQGRVTMTRDTSISSVYMILSSLRSDDTAVYYCARSSWLQLTYYFDYWGQGTLVTVSSASTKGPSVFPLAPSSKSTSGGTAALGCLVKDYFPEPVTVSWNSGALTSGVHTFPAVLQSSGLYSLSSVVTVPSSSLGTQTYICNVNHKPSNTKVDKKVEPKSCDKTHTCPPCPAPEAAGGPSVFLFPPKPKDTLMISRTPEVTCVVVDVSHEDPEVKFNWYVDGVEVHNAKTKPREEQYNSTYRVVSVLTVLHQDWLNGKEYKCKVSNKALGAPIEKTISKAKGQPREPQVYTLPPSREEMTKNQVSLTCLVKGFYPSDIAVEWESNGQPENNYKTTPPVLDSDGSFFLYSKLTVDKSRWQQGNVFSCSVMHEALHNHYTQKSLSLSPGK

SEQ ID NO: 5741 - protein, 470 aa, synthetic construct
MGWSCIILFLVATATGVHSQVQLVQSGAEVKKPGASVKVSCKASGYTFTSYYIHWVRQAPGQGLEWMGIINPSGGSTSYAQKFQGRVTMTRDTSTSTVYMEVSSLRSEDTAVYYCAREGLQLGSNWFDPWGQGTLVTVSSASTKGPSVFPLAPSSKSTSGGTAALGCLVKDYFPEPVTVSWNSGALTSGVHTFPAVLQSSGLYSLSSVVTVPSSSLGTQTYICNVNHKPSNTKVDKKVEPKSCDKTHTCPPCPAPEAAGGPSVFLFPPKPKDTLMISRTPEVTCVVVDVSHEDPEVKFNWYVDGVEVHNAKTKPREEQYNSTYRVVSVLTVLHQDWLNGKEYKCKVSNKALGAPIEKTISKAKGQPREPQVYTLPPSREEMTKNQVSLTCLVKGFYPSDIAVEWESNGQPENNYKTTPPVLDSDGSFFLYSKLTVDKSRWQQGNVFSCSVMHEALHNHYTQKSLSLSPGK

SEQ ID NO: 5742 - protein, 470 aa, synthetic construct
MGWSCIILFLVATATGVHSEVQLVESGGGLVQPGGSLRLSCAASGFTFSSYSMNWVRQAPGKGLEWVSYISSSSSTIYYADSVKGRFTISRDNAKNSLYLQMNSLRDEDTAVYYCARNDILTGEDAFDIWGQGTMVTVSSASTKGPSVFPLAPSSKSTSGGTAALGCLVKDYFPEPVTVSWNSGALTSGVHTFPAVLQSSGLYSLSSVVTVPSSSLGTQTYICNVNHKPSNTKVDKKVEPKSCDKTHTCPPCPAPEAAGGPSVFLFPPKPKDTLMISRTPEVTCVVVDVSHEDPEVKFNWYVDGVEVHNAKTKPREEQYNSTYRVVSVLTVLHQDWLNGKEYKCKVSNKALGAPIEKTISKAKGQPREPQVYTLPPSREEMTKNQVSLTCLVKGFYPSDIAVEWESNGQPENNYKTTPPVLDSDGSFFLYSKLTVDKSRWQQGNVFSCSVMHEALHNHYTQKSLSLSPGK

SEQ ID NO: 5743 - protein, 470 aa, synthetic construct
MGWSCIILFLVATATGVHSEVQLVESGGGLVQPGGSLRLSCAASGFTFSNYAMSWVRQAPGKGLGWVSGISGSGGRTYYADSVKGRFTISRDNSKNTLYLQMNSLRAEDTAVYYCAKESIIVGATMFDYWGQGTLVTVSSASTKGPSVFPLAPSSKSTSGGTAALGCLVKDYFPEPVTVSWNSGALTSGVHTFPAVLQSSGLYSLSSVVTVPSSSLGTQTYICNVNHKPSNTKVDKKVEPKSCDKTHTCPPCPAPEAAGGPSVFLFPPKPKDTLMISRTPEVTCVVVDVSHEDPEVKFNWYVDGVEVHNAKTKPREEQYNSTYRVVSVLTVLHQDWLNGKEYKCKVSNKALGAPIEKTISKAKGQPREPQVYTLPPSREEMTKNQVSLTCLVKGFYPSDIAVEWESNGQPENNYKTTPPVLDSDGSFFLYSKLTVDKSRWQQGNVFSCSVMHEALHNHYTQKSLSLSPGK

SEQ ID NO: 5744 - protein, 470 aa, synthetic construct
MGWSCIILFLVATATGVHSQVQLVESGGGVVQPGRSLRLSCAASGFTFSSYGMHWVRQAPGKGLEWVAVISYDGSNKYYADSVKGRFTISRDNSKNTLYLQMNSLRAEDTAVYYCAKGIAALGYYYMDVWGKGTTVTVSSASTKGPSVFPLAPSSKSTSGGTAALGCLVKDYFPEPVTVSWNSGALTSGVHTFPAVLQSSGLYSLSSVVTVPSSSLGTQTYICNVNHKPSNTKVDKKVEPKSCDKTHTCPPCPAPEAAGGPSVFLFPPKPKDTLMISRTPEVTCVVVDVSHEDPEVKFNWYVDGVEVHNAKTKPREEQYNSTYRVVSVLTVLHQDWLNGKEYKCKVSNKALGAPIEKTISKAKGQPREPQVYTLPPSREEMTKNQVSLTCLVKGFYPSDIAVEWESNGQPENNYKTTPPVLDSDGSFFLYSKLTVDKSRWQQGNVFSCSVMHEALHNHYTQKSLSLSPGK

SEQ ID NO: 5745 - protein, 470 aa, synthetic construct
MGWSCIILFLVATATGVHSEVQLVQSGAEMKKPGESLKISCKDSGYRFSNYWIGWVRQLPGKGLEWMGIIYPGDSDTRYSPSFQGQVTISADKSINTAYLQWNSLKASDTAIYYCAKRRITGSHNWFDPWGQGTLVTVSSASTKGPSVFPLAPSSKSTSGGTAALGCLVKDYFPEPVTVSWNSGALTSGVHTFPAVLQSSGLYSLSSVVTVPSSSLGTQTYICNVNHKPSNTKVDKKVEPKSCDKTHTCPPCPAPEAAGGPSVFLFPPKPKDTLMISRTPEVTCVVVDVSHEDPEVKFNWYVDGVEVHNAKTKPREEQYNSTYRVVSVLTVLHQDWLNGKEYKCKVSNKALGAPIEKTISKAKGQPREPQVYTLPPSREEMTKNQVSLTCLVKGFYPSDIAVEWESNGQPENNYKTTPPVLDSDGSFFLYSKLTVDKSRWQQGNVFSCSVMHEALHNHYTQKSLSLSPGK

SEQ ID NO: 5746 - protein, 470 aa, synthetic construct
MGWSCIILFLVATATGVHSQVQLVQSGSELKKPGASVKVSCKASGYTFTSYAMNWVRQAPGQGLEWMGWINTNTGNPTYAQGFTGRFVFSLDTSVSTAYLQISSLKAEDTAVYYCARGGTIFGVVNFDYWGQGTLVTVSSASTKGPSVFPLAPSSKSTSGGTAALGCLVKDYFPEPVTVSWNSGALTSGVHTFPAVLQSSGLYSLSSVVTVPSSSLGTQTYICNVNHKPSNTKVDKKVEPKSCDKTHTCPPCPAPEAAGGPSVFLFPPKPKDTLMISRTPEVTCVVVDVSHEDPEVKFNWYVDGVEVHNAKTKPREEQYNSTYRVVSVLTVLHQDWLNGKEYKCKVSNKALGAPIEKTISKAKGQPREPQVYTLPPSREEMTKNQVSLTCLVKGFYPSDIAVEWESNGQPENNYKTTPPVLDSDGSFFLYSKLTVDKSRWQQGNVFSCSVMHEALHNHYTQKSLSLSPGK

SEQ ID NO: 5747 - protein, 470 aa, synthetic construct
MGWSCIILFLVATATGVHSQVQLVESGGGVVQPGRSLRLSCAASGFTFSSYVMHWVRQAPGKGLEWVAVIWYDGSNKYFADSVKGRFTISRDNSNNTLYLQMNSLRAEDTGVYYCLSRSGYSAHNDGDYWGQGTLVTVSSASTKGPSVFPLAPSSKSTSGGTAALGCLVKDYFPEPVTVSWNSGALTSGVHTFPAVLQSSGLYSLSSVVTVPSSSLGTQTYICNVNHKPSNTKVDKKVEPKSCDKTHTCPPCPAPEAAGGPSVFLFPPKPKDTLMISRTPEVTCVVVDVSHEDPEVKFNWYVDGVEVHNAKTKPREEQYNSTYRVVSVLTVLHQDWLNGKEYKCKVSNKALGAPIEKTISKAKGQPREPQVYTLPPSREEMTKNQVSLTCLVKGFYPSDIAVEWESNGQPENNYKTTPPVLDSDGSFFLYSKLTVDKSRWQQGNVFSCSVMHEALHNHYTQKSLSLSPGK

SEQ ID NO: 5748 - protein, 470 aa, synthetic construct
MGWSCIILFLVATATGVHSQVQLVQSGAEVKKPGASVKVSCKASGYTFTGYYIFWVRQAPGQGLEWMGWINPNSGGTNYAQKFQGRVTMTRDTSITTAYMELSRLRHDDTAVYYCTKEGLVVRPDWFDPWGQGTLVTVSSASTKGPSVFPLAPSSKSTSGGTAALGCLVKDYFPEPVTVSWNSGALTSGVHTFPAVLQSSGLYSLSSVVTVPSSSLGTQTYICNVNHKPSNTKVDKKVEPKSCDKTHTCPPCPAPEAAGGPSVFLFPPKPKDTLMISRTPEVTCVVVDVSHEDPEVKFNWYVDGVEVHNAKTKPREEQYNSTYRVVSVLTVLHQDWLNGKEYKCKVSNKALGAPIEKTISKAKGQPREPQVYTLPPSREEMTKNQVSLTCLVKGFYPSDIAVEWESNGQPENNYKTTPPVLDSDGSFFLYSKLTVDKSRWQQGNVFSCSVMHEALHNHYTQKSLSLSPGK

SEQ ID NO: 5749 - protein, 469 aa, synthetic construct
MGWSCIILFLVATATGVHSQVQLQQSGPGLVKPTQTLSLTCAISGDSVSSNSAAWNWIRQSPSRGLEWLGRTYYRSKWYNDYAVSVRSRITINPDTSKNQFSLHLNSVTPEDTAVYYCARKGRDVFDIWGQGTMVTVSSASTKGPSVFPLAPSSKSTSGGTAALGCLVKDYFPEPVTVSWNSGALTSGVHTFPAVLQSSGLYSLSSVVTVPSSSLGTQTYICNVNHKPSNTKVDKKVEPKSCDKTHTCPPCPAPEAAGGPSVFLFPPKPKDTLMISRTPEVTCVVVDVSHEDPEVKFNWYVDGVEVHNAKTKPREEQYNSTYRVVSVLTVLHQDWLNGKEYKCKVSNKALGAPIEKTISKAKGQPREPQVYTLPPSREEMTKNQVSLTCLVKGFYPSDIAVEWESNGQPENNYKTTPPVLDSDGSFFLYSKLTVDKSRWQQGNVFSCSVMHEALHNHYTQKSLSLSPGK

SEQ ID NO: 5750 - protein, 470 aa, synthetic construct
MGWSCIILFLVATATGVHSQVQLVQSGAEVKKPGASVKVSCKASGYTFTSYGISWVRQAPGQGLEWMGWISAYNGNTNYAQKLQGRVTMTTDTSTSTAYMELRSLRSDDTAVYYCAREGSGSYSDAFDIWGQGTMVTVSSASTKGPSVFPLAPSSKSTSGGTAALGCLVKDYFPEPVTVSWNSGALTSGVHTFPAVLQSSGLYSLSSVVTVPSSSLGTQTYICNVNHKPSNTKVDKKVEPKSCDKTHTCPPCPAPEAAGGPSVFLFPPKPKDTLMISRTPEVTCVVVDVSHEDPEVKFNWYVDGVEVHNAKTKPREEQYNSTYRVVSVLTVLHQDWLNGKEYKCKVSNKALGAPIEKTISKAKGQPREPQVYTLPPSREEMTKNQVSLTCLVKGFYPSDIAVEWESNGQPENNYKTTPPVLDSDGSFFLYSKLTVDKSRWQQGNVFSCSVMHEALHNHYTQKSLSLSPGK

SEQ ID NO: 5751 - protein, 470 aa, synthetic construct
MGWSCIILFLVATATGVHSQITLKESGPTLVKPTQTLTLTCTFSGFSITTSGVGVGWIRQPSGKALEWLALIYWNDDKRYSPSLKSRLTITKDTSKNQVVLTMTNMDPVDTATYYCTHTEYRNTWCVDYWGQGTLVTVSSASTKGPSVFPLAPSSKSTSGGTAALGCLVKDYFPEPVTVSWNSGALTSGVHTFPAVLQSSGLYSLSSVVTVPSSSLGTQTYICNVNHKPSNTKVDKKVEPKSCDKTHTCPPCPAPEAAGGPSVFLFPPKPKDTLMISRTPEVTCVVVDVSHEDPEVKFNWYVDGVEVHNAKTKPREEQYNSTYRVVSVLTVLHQDWLNGKEYKCKVSNKALGAPIEKTISKAKGQPREPQVYTLPPSREEMTKNQVSLTCLVKGFYPSDIAVEWESNGQPENNYKTTPPVLDSDGSFFLYSKLTVDKSRWQQGNVFSCSVMHEALHNHYTQKSLSLSPGK

SEQ ID NO: 5752 - protein, 470 aa, synthetic construct
MGWSCIILFLVATATGVHSQITLKESGPTLVKPTQTLTLTCTFSGFSLSTSGVGVGWIRQPPGKALEWLALIYWNDDKRYSPSLKSRLTITKDTSKNQVVLTMTNMDPVDTATYYCAHSPYTSGWPFDYWGQGTLVTVSSASTKGPSVFPLAPSSKSTSGGTAALGCLVKDYFPEPVTVSWNSGALTSGVHTFPAVLQSSGLYSLSSVVTVPSSSLGTQTYICNVNHKPSNTKVDKKVEPKSCDKTHTCPPCPAPEAAGGPSVFLFPPKPKDTLMISRTPEVTCVVVDVSHEDPEVKFNWYVDGVEVHNAKTKPREEQYNSTYRVVSVLTVLHQDWLNGKEYKCKVSNKALGAPIEKTISKAKGQPREPQVYTLPPSREEMTKNQVSLTCLVKGFYPSDIAVEWESNGQPENNYKTTPPVLDSDGSFFLYSKLTVDKSRWQQGNVFSCSVMHEALHNHYTQKSLSLSPGK

SEQ ID NO: 5753 - protein, 470 aa, synthetic construct
MGWSCIILFLVATATGVHSQVQLVQSGAEVKKPGASVKVSCKASGYTFTSYDINWVRQATGQGLEWMGWMNPNSGNTGYAQKFQGRVTMTRNTSISTAYMELSSLRSEDTAVYYCARVSYSSSWSLFDYWGQGTLVTVSSASTKGPSVFPLAPSSKSTSGGTAALGCLVKDYFPEPVTVSWNSGALTSGVHTFPAVLQSSGLYSLSSVVTVPSSSLGTQTYICNVNHKPSNTKVDKKVEPKSCDKTHTCPPCPAPEAAGGPSVFLFPPKPKDTLMISRTPEVTCVVVDVSHEDPEVKFNWYVDGVEVHNAKTKPREEQYNSTYRVVSVLTVLHQDWLNGKEYKCKVSNKALGAPIEKTISKAKGQPREPQVYTLPPSREEMTKNQVSLTCLVKGFYPSDIAVEWESNGQPENNYKTTPPVLDSDGSFFLYSKLTVDKSRWQQGNVFSCSVMHEALHNHYTQKSLSLSPGK

SEQ ID NO: 5754 - protein, 471 aa, synthetic construct
MGWSCIILFLVATATGVHSQVTLRESGPALVKPTQTLTLTCTFSGFSLSTSGMSLSWIRQPPGKALEWLALIDWDDDQYYSTSLKTRLTISKDTSKNQVVLSMTNMDPVDTATYYCARIRGVGALDGFDFWGQGTMVTVSSASTKGPSVFPLAPSSKSTSGGTAALGCLVKDYFPEPVTVSWNSGALTSGVHTFPAVLQSSGLYSLSSVVTVPSSSLGTQTYICNVNHKPSNTKVDKKVEPKSCDKTHTCPPCPAPEAAGGPSVFLFPPKPKDTLMISRTPEVTCVVVDVSHEDPEVKFNWYVDGVEVHNAKTKPREEQYNSTYRVVSVLTVLHQDWLNGKEYKCKVSNKALGAPIEKTISKAKGQPREPQVYTLPPSREEMTKNQVSLTCLVKGFYPSDIAVEWESNGQPENNYKTTPPVLDSDGSFFLYSKLTVDKSRWQQGNVFSCSVMHEALHNHYTQKSLSLSPGK

SEQ ID NO: 5755 - protein, 471 aa, synthetic construct
MGWSCIILFLVATATGVHSQVQLVQSGAEVKKPGASVKVSCKASGYTFTSYGISWVRQAPGQGLEWMGWISGYKGNTNCAQELQGRVTITSDTSTSTAYMELRSLRSDDTAVYYCARPLDYGDYEGWFDPWGQGTLVTVSSASTKGPSVFPLAPSSKSTSGGTAALGCLVKDYFPEPVTVSWNSGALTSGVHTFPAVLQSSGLYSLSSVVTVPSSSLGTQTYICNVNHKPSNTKVDKKVEPKSCDKTHTCPPCPAPEAAGGPSVFLFPPKPKDTLMISRTPEVTCVVVDVSHEDPEVKFNWYVDGVEVHNAKTKPREEQYNSTYRVVSVLTVLHQDWLNGKEYKCKVSNKALGAPIEKTISKAKGQPREPQVYTLPPSREEMTKNQVSLTCLVKGFYPSDIAVEWESNGQPENNYKTTPPVLDSDGSFFLYSKLTVDKSRWQQGNVFSCSVMHEALHNHYTQKSLSLSPGK

SEQ ID NO: 5756 - protein, 471 aa, synthetic construct
MGWSCIILFLVATATGVHSQVQLVQSGIEMRKPGASVKVSCRASGDTFTNCGFGWVRQAPGQGLEWMGWISAYNGNTNYAQKFQGRVTMTTDTSTSTAYMELRSLRSDDTAVYYCAREGRTNYFYYYMDVWGQGTTVTVSSASTKGPSVFPLAPSSKSTSGGTAALGCLVKDYFPEPVTVSWNSGALTSGVHTFPAVLQSSGLYSLSSVVTVPSSSLGTQTYICNVNHKPSNTKVDKKVEPKSCDKTHTCPPCPAPEAAGGPSVFLFPPKPKDTLMISRTPEVTCVVVDVSHEDPEVKFNWYVDGVEVHNAKTKPREEQYNSTYRVVSVLTVLHQDWLNGKEYKCKVSNKALGAPIEKTISKAKGQPREPQVYTLPPSREEMTKNQVSLTCLVKGFYPSDIAVEWESNGQPENNYKTTPPVLDSDGSFFLYSKLTVDKSRWQQGNVFSCSVMHEALHNHYTQKSLSLSPGK

SEQ ID NO: 5757 - protein, 471 aa, synthetic construct
MGWSCIILFLVATATGVHSEVQLVESGGGLVQPGRSLRLSCAASGFTFDDYAMHWVRQAPGKGLEWVSGISKNSGSIGYADSVKGRFTISRDNAKKSLYLQMNSLRVEDTALYYCAKDITASGDYYYMDVWGQGTTVTVSSASTKGPSVFPLAPSSKSTSGGTAALGCLVKDYFPEPVTVSWNSGALTSGVHTFPAVLQSSGLYSLSSVVTVPSSSLGTQTYICNVNHKPSNTKVDKKVEPKSCDKTHTCPPCPAPEAAGGPSVFLFPPKPKDTLMISRTPEVTCVVVDVSHEDPEVKFNWYVDGVEVHNAKTKPREEQYNSTYRVVSVLTVLHQDWLNGKEYKCKVSNKALGAPIEKTISKAKGQPREPQVYTLPPSREEMTKNQVSLTCLVKGFYPSDIAVEWESNGQPENNYKTTPPVLDSDGSFFLYSKLTVDKSRWQQGNVFSCSVMHEALHNHYTQKSLSLSPGK

SEQ ID NO: 5758 - protein, 471 aa, synthetic construct
MGWSCIILFLVATATGVHSEVQLVESGGGLVQPGGSLRLSCAASGFTFSSYSMNWVRQAPGKGLEWVSYISSSSSTIYFADSVKGRFTISRDNAKNSLYLQMNSLRDEDTAVYYCARDRVYNWNDGAFDIWGQGTMVTVSSASTKGPSVFPLAPSSKSTSGGTAALGCLVKDYFPEPVTVSWNSGALTSGVHTFPAVLQSSGLYSLSSVVTVPSSSLGTQTYICNVNHKPSNTKVDKKVEPKSCDKTHTCPPCPAPEAAGGPSVFLFPPKPKDTLMISRTPEVTCVVVDVSHEDPEVKFNWYVDGVEVHNAKTKPREEQYNSTYRVVSVLTVLHQDWLNGKEYKCKVSNKALGAPIEKTISKAKGQPREPQVYTLPPSREEMTKNQVSLTCLVKGFYPSDIAVEWESNGQPENNYKTTPPVLDSDGSFFLYSKLTVDKSRWQQGNVFSCSVMHEALHNHYTQKSLSLSPGK

SEQ ID NO: 5759 - protein, 471 aa, synthetic construct
MGWSCIILFLVATATGVHSEVQLVESGGGLVQPGGSLRLSCAASGFTFSSYAMSWVRQAPGKGLEWVSAISGSGGSTYYADSVKGRFTISRDNSKNTMYLQMNSLRAEDTAVYYCAKDQRYNWNSWYFDLWGRGTLVTVSSASTKGPSVFPLAPSSKSTSGGTAALGCLVKDYFPEPVTVSWNSGALTSGVHTFPAVLQSSGLYSLSSVVTVPSSSLGTQTYICNVNHKPSNTKVDKKVEPKSCDKTHTCPPCPAPEAAGGPSVFLFPPKPKDTLMISRTPEVTCVVVDVSHEDPEVKFNWYVDGVEVHNAKTKPREEQYNSTYRVVSVLTVLHQDWLNGKEYKCKVSNKALGAPIEKTISKAKGQPREPQVYTLPPSREEMTKNQVSLTCLVKGFYPSDIAVEWESNGQPENNYKTTPPVLDSDGSFFLYSKLTVDKSRWQQGNVFSCSVMHEALHNHYTQKSLSLSPGK

SEQ ID NO: 5760 - protein, 471 aa, synthetic construct
MGWSCIILFLVATATGVHSQVQLVESGGGVVQPGRSLRLSCAASGFTFSSYGMHWVRQAPGKGLEWVAVIWYDGSNKYYADSVKGRFTISRDNSKNTLYLQMNSLRAEDTAVYYCARDHGGVTTYNWFDPWGQGTLVTVSSASTKGPSVFPLAPSSKSTSGGTAALGCLVKDYFPEPVTVSWNSGALTSGVHTFPAVLQSSGLYSLSSVVTVPSSSLGTQTYICNVNHKPSNTKVDKKVEPKSCDKTHTCPPCPAPEAAGGPSVFLFPPKPKDTLMISRTPEVTCVVVDVSHEDPEVKFNWYVDGVEVHNAKTKPREEQYNSTYRVVSVLTVLHQDWLNGKEYKCKVSNKALGAPIEKTISKAKGQPREPQVYTLPPSREEMTKNQVSLTCLVKGFYPSDIAVEWESNGQPENNYKTTPPVLDSDGSFFLYSKLTVDKSRWQQGNVFSCSVMHEALHNHYTQKSLSLSPGK

SEQ ID NO: 5761 - protein, 471 aa, synthetic construct
MGWSCIILFLVATATGVHSQVQLVQSGAEVKKPGASVKVSCKASGYTFTGYYMHWVRQAPGQGLEWMGWINPNSGGTNYAQKFQGRVTMTRDTSISTAYMELSRLRSDDTAVYYCARDRMVRGVLDAFDIWGQGTMVTVSSASTKGPSVFPLAPSSKSTSGGTAALGCLVKDYFPEPVTVSWNSGALTSGVHTFPAVLQSSGLYSLSSVVTVPSSSLGTQTYICNVNHKPSNTKVDKKVEPKSCDKTHTCPPCPAPEAAGGPSVFLFPPKPKDTLMISRTPEVTCVVVDVSHEDPEVKFNWYVDGVEVHNAKTKPREEQYNSTYRVVSVLTVLHQDWLNGKEYKCKVSNKALGAPIEKTISKAKGQPREPQVYTLPPSREEMTKNQVSLTCLVKGFYPSDIAVEWESNGQPENNYKTTPPVLDSDGSFFLYSKLTVDKSRWQQGNVFSCSVMHEALHNHYTQKSLSLSPGK

SEQ ID NO: 5762 - protein, 471 aa, synthetic construct
MGWSCIILFLVATATGVHSEVQLVESGGGLVQPGGSLRLSCAASGFTFSSYSMNWVRQAPGKGLEWVSYISSSSSTIYYADSVKGRFTISRDNAKNSLYLQMNSLRDEDTAVYYCVRGYSSGWYNWYFDLWGRGTLVTVSSASTKGPSVFPLAPSSKSTSGGTAALGCLVKDYFPEPVTVSWNSGALTSGVHTFPAVLQSSGLYSLSSVVTVPSSSLGTQTYICNVNHKPSNTKVDKKVEPKSCDKTHTCPPCPAPEAAGGPSVFLFPPKPKDTLMISRTPEVTCVVVDVSHEDPEVKFNWYVDGVEVHNAKTKPREEQYNSTYRVVSVLTVLHQDWLNGKEYKCKVSNKALGAPIEKTISKAKGQPREPQVYTLPPSREEMTKNQVSLTCLVKGFYPSDIAVEWESNGQPENNYKTTPPVLDSDGSFFLYSKLTVDKSRWQQGNVFSCSVMHEALHNHYTQKSLSLSPGK

SEQ ID NO: 5763 - protein, 471 aa, synthetic construct
MGWSCIILFLVATATGVHSQVQLVESGGGLVKPGGSLRLSCAASGFTFSDYYMSWIRQAPGKGLEWVSYISSSGSTIYYADSVKGRFTISRDNAKNSLYLQMNSLRAEDTAVYYCARKVPGIAAAGAFDYWGQGTLVTVSSASTKGPSVFPLAPSSKSTSGGTAALGCLVKDYFPEPVTVSWNSGALTSGVHTFPAVLQSSGLYSLSSVVTVPSSSLGTQTYICNVNHKPSNTKVDKKVEPKSCDKTHTCPPCPAPEAAGGPSVFLFPPKPKDTLMISRTPEVTCVVVDVSHEDPEVKFNWYVDGVEVHNAKTKPREEQYNSTYRVVSVLTVLHQDWLNGKEYKCKVSNKALGAPIEKTISKAKGQPREPQVYTLPPSREEMTKNQVSLTCLVKGFYPSDIAVEWESNGQPENNYKTTPPVLDSDGSFFLYSKLTVDKSRWQQGNVFSCSVMHEALHNHYTQKSLSLSPGK

SEQ ID NO: 5764 - protein, 471 aa, synthetic construct
MGWSCIILFLVATATGVHSQVQLVQSGSELKKPGASVKVSCKASGYTFNSYAMNWVRQAPGLGLEWMGWINTNTGNPTYAQGFSGRFVFSLDTSVNTAYLQISSLQAEDTAVYFCARGGYGYNFWIRFDPWGQGTLVTVSSASTKGPSVFPLAPSSKSTSGGTAALGCLVKDYFPEPVTVSWNSGALTSGVHTFPAVLQSSGLYSLSSVVTVPSSSLGTQTYICNVNHKPSNTKVDKKVEPKSCDKTHTCPPCPAPEAAGGPSVFLFPPKPKDTLMISRTPEVTCVVVDVSHEDPEVKFNWYVDGVEVHNAKTKPREEQYNSTYRVVSVLTVLHQDWLNGKEYKCKVSNKALGAPIEKTISKAKGQPREPQVYTLPPSREEMTKNQVSLTCLVKGFYPSDIAVEWESNGQPENNYKTTPPVLDSDGSFFLYSKLTVDKSRWQQGNVFSCSVMHEALHNHYTQKSLSLSPGK

SEQ ID NO: 5765 - protein, 465 aa, synthetic construct
MGWSCIILFLVATATGVHSQLQLQESGPGLVKPSETLSLTCTVSGGSISRSSYYWGWIRQPPGRGLEWIGSIYYSGSTYYNPSLKSRVTISVDTSKNQFSLKLSSVTAADTGVYYCASYWNFDYWGRGTLVTVSSASTKGPSVFPLAPSSKSTSGGTAALGCLVKDYFPEPVTVSWNSGALTSGVHTFPAVLQSSGLYSLSSVVTVPSSSLGTQTYICNVNHKPSNTKVDKKVEPKSCDKTHTCPPCPAPEAAGGPSVFLFPPKPKDTLMISRTPEVTCVVVDVSHEDPEVKFNWYVDGVEVHNAKTKPREEQYNSTYRVVSVLTVLHQDWLNGKEYKCKVSNKALGAPIEKTISKAKGQPREPQVYTLPPSREEMTKNQVSLTCLVKGFYPSDIAVEWESNGQPENNYKTTPPVLDSDGSFFLYSKLTVDKSRWQQGNVFSCSVMHEALHNHYTQKSLSLSPGK

SEQ ID NO: 5766 - protein, 472 aa, synthetic construct
MGWSCIILFLVATATGVHSQVQLQESGPGLVKPSGTLSLTCAVSGGSISSSFWLSWVRQPPGKGLEWIGEIYHSGSTNYNPSLKSRVTISVDKSKNQFSLKLTSVTAADTAVYSCARVLGYSYGYRRWFDPWGQGTLVTVSSASTKGPSVFPLAPSSKSTSGGTAALGCLVKDYFPEPVTVSWNSGALTSGVHTFPAVLQSSGLYSLSSVVTVPSSSLGTQTYICNVNHKPSNTKVDKKVEPKSCDKTHTCPPCPAPEAAGGPSVFLFPPKPKDTLMISRTPEVTCVVVDVSHEDPEVKFNWYVDGVEVHNAKTKPREEQYNSTYRVVSVLTVLHQDWLNGKEYKCKVSNKALGAPIEKTISKAKGQPREPQVYTLPPSREEMTKNQVSLTCLVKGFYPSDIAVEWESNGQPENNYKTTPPVLDSDGSFFLYSKLTVDKSRWQQGNVFSCSVMHEALHNHYTQKSLSLSPGK

SEQ ID NO: 5767 - protein, 472 aa, synthetic construct
MGWSCIILFLVATATGVHSEVQLVESGGGLVNPGGSLRLSCAASGFTFSNAWMSWVRQGPGRGLEWVGRIKSKSDGETIDYAAPVKGRFSFSRDDAENTLYLEMNSLKTEDTAVYYCTTEGSFNFYYFMDVWGQGTMVTVSSASTKGPSVFPLAPSSKSTSGGTAALGCLVKDYFPEPVTVSWNSGALTSGVHTFPAVLQSSGLYSLSSVVTVPSSSLGTQTYICNVNHKPSNTKVDKKVEPKSCDKTHTCPPCPAPEAAGGPSVFLFPPKPKDTLMISRTPEVTCVVVDVSHEDPEVKFNWYVDGVEVHNAKTKPREEQYNSTYRVVSVLTVLHQDWLNGKEYKCKVSNKALGAPIEKTISKAKGQPREPQVYTLPPSREEMTKNQVSLTCLVKGFYPSDIAVEWESNGQPENNYKTTPPVLDSDGSFFLYSKLTVDKSRWQQGNVFSCSVMHEALHNHYTQKSLSLSPGK

SEQ ID NO: 5768 - protein, 472 aa, synthetic construct
MGWSCIILFLVATATGVHSQVQLQESGPGLVKPSETLSLTCTVSGGSISSYYWSWIRQPPGKGLEWIGHIYYSGSTNYNPSLKSRVTISVDTSKNQFSLKLSSVTAADTAVYYCARDPFYYDFSDYYYMDVWGQGTTVTVSSASTKGPSVFPLAPSSKSTSGGTAALGCLVKDYFPEPVTVSWNSGALTSGVHTFPAVLQSSGLYSLSSVVTVPSSSLGTQTYICNVNHKPSNTKVDKKVEPKSCDKTHTCPPCPAPEAAGGPSVFLFPPKPKDTLMISRTPEVTCVVVDVSHEDPEVKFNWYVDGVEVHNAKTKPREEQYNSTYRVVSVLTVLHQDWLNGKEYKCKVSNKALGAPIEKTISKAKGQPREPQVYTLPPSREEMTKNQVSLTCLVKGFYPSDIAVEWESNGQPENNYKTTPPVLDSDGSFFLYSKLTVDKSRWQQGNVFSCSVMHEALHNHYTQKSLSLSPGK

SEQ ID NO: 5769 - protein, 472 aa, synthetic construct
MGWSCIILFLVATATGVHSEVQLVESGGGLVQPGGSLRLSCAASGFTFSSYAMSWVRQAPGKGLEWVSAISGSGGSTYYADSVKGRFTISRDNSKNTLYLQMNSLRAEDTAVYYCAKNEARDYYGSGSFDYWGQGTLVTVSSASTKGPSVFPLAPSSKSTSGGTAALGCLVKDYFPEPVTVSWNSGALTSGVHTFPAVLQSSGLYSLSSVVTVPSSSLGTQTYICNVNHKPSNTKVDKKVEPKSCDKTHTCPPCPAPEAAGGPSVFLFPPKPKDTLMISRTPEVTCVVVDVSHEDPEVKFNWYVDGVEVHNAKTKPREEQYNSTYRVVSVLTVLHQDWLNGKEYKCKVSNKALGAPIEKTISKAKGQPREPQVYTLPPSREEMTKNQVSLTCLVKGFYPSDIAVEWESNGQPENNYKTTPPVLDSDGSFFLYSKLTVDKSRWQQGNVFSCSVMHEALHNHYTQKSLSLSPGK

SEQ ID NO: 5770 - protein, 472 aa, synthetic construct
MGWSCIILFLVATATGVHSEVQLVESGGGVVRPGGSLRLSCAASGFTFGDFGMSWVRQAPGKGLEWVSGINWNGGSTGYADSVKGRFTISRDNAKNSLYLQMNSLRAEDTALYYCASLVGATDYYFYYMDVWGQGTTVTVSSASTKGPSVFPLAPSSKSTSGGTAALGCLVKDYFPEPVTVSWNSGALTSGVHTFPAVLQSSGLYSLSSVVTVPSSSLGTQTYICNVNHKPSNTKVDKKVEPKSCDKTHTCPPCPAPEAAGGPSVFLFPPKPKDTLMISRTPEVTCVVVDVSHEDPEVKFNWYVDGVEVHNAKTKPREEQYNSTYRVVSVLTVLHQDWLNGKEYKCKVSNKALGAPIEKTISKAKGQPREPQVYTLPPSREEMTKNQVSLTCLVKGFYPSDIAVEWESNGQPENNYKTTPPVLDSDGSFFLYSKLTVDKSRWQQGNVFSCSVMHEALHNHYTQKSLSLSPGK

SEQ ID NO: 5771 - protein, 471 aa, synthetic construct
MGWSCIILFLVATATGVHSQVQLQQSGPGLVKPSQTLSLTCAISGDSVSSNSAAWNWIRQSPSRGLEWLGRTYYRSKWYNDYAVSVKSRITINPDTSKNQFSLQLNSVTPEDTAVYYCARKWELLDAFDIWGQGTMVTVSSASTKGPSVFPLAPSSKSTSGGTAALGCLVKDYFPEPVTVSWNSGALTSGVHTFPAVLQSSGLYSLSSVVTVPSSSLGTQTYICNVNHKPSNTKVDKKVEPKSCDKTHTCPPCPAPEAAGGPSVFLFPPKPKDTLMISRTPEVTCVVVDVSHEDPEVKFNWYVDGVEVHNAKTKPREEQYNSTYRVVSVLTVLHQDWLNGKEYKCKVSNKALGAPIEKTISKAKGQPREPQVYTLPPSREEMTKNQVSLTCLVKGFYPSDIAVEWESNGQPENNYKTTPPVLDSDGSFFLYSKLTVDKSRWQQGNVFSCSVMHEALHNHYTQKSLSLSPGK

SEQ ID NO: 5772 - protein, 472 aa, synthetic construct
MGWSCIILFLVATATGVHSEVQLVESGGGLVQPGGSLRLSCAASGFTFSSYSMNWVRQAPGKGLEWVSYISSSSSTIYYADSVKGRFTISRDNAKNSLYLQMNSLRDEDTAVYYCAREERDDYSNYGYFQHWGQGTLVTVSSASTKGPSVFPLAPSSKSTSGGTAALGCLVKDYFPEPVTVSWNSGALTSGVHTFPAVLQSSGLYSLSSVVTVPSSSLGTQTYICNVNHKPSNTKVDKKVEPKSCDKTHTCPPCPAPEAAGGPSVFLFPPKPKDTLMISRTPEVTCVVVDVSHEDPEVKFNWYVDGVEVHNAKTKPREEQYNSTYRVVSVLTVLHQDWLNGKEYKCKVSNKALGAPIEKTISKAKGQPREPQVYTLPPSREEMTKNQVSLTCLVKGFYPSDIAVEWESNGQPENNYKTTPPVLDSDGSFFLYSKLTVDKSRWQQGNVFSCSVMHEALHNHYTQKSLSLSPGK

SEQ ID NO: 5773 - protein, 471 aa, synthetic construct
MGWSCIILFLVATATGVHSQVQLQQSGPGLVKPSQTLSLTCAISGDSVSSNSATWNWIRQSPSRGLEWLGRSYYMSKWYNDYAVSVKSRITINPDTSKNQFSLQLNSVTPEDTAVYYCARGDWNYGVLDSWGQGTLVTVSSASTKGPSVFPLAPSSKSTSGGTAALGCLVKDYFPEPVTVSWNSGALTSGVHTFPAVLQSSGLYSLSSVVTVPSSSLGTQTYICNVNHKPSNTKVDKKVEPKSCDKTHTCPPCPAPEAAGGPSVFLFPPKPKDTLMISRTPEVTCVVVDVSHEDPEVKFNWYVDGVEVHNAKTKPREEQYNSTYRVVSVLTVLHQDWLNGKEYKCKVSNKALGAPIEKTISKAKGQPREPQVYTLPPSREEMTKNQVSLTCLVKGFYPSDIAVEWESNGQPENNYKTTPPVLDSDGSFFLYSKLTVDKSRWQQGNVFSCSVMHEALHNHYTQKSLSLSPGK

SEQ ID NO: 5774 - protein, 472 aa, synthetic construct
MGWSCIILFLVATATGVHSQVQLVQSGAEVKKPRASVKVSCEASGYTFTTYGISWVRQAPGQGLEWMGWISAYNGNTKYTQKLQGRVAMTTDTSTSTAYMEVRSLRSDDTAVYYCARSGYNWNYDYYFMDVWGQGTTVTVSSASTKGPSVFPLAPSSKSTSGGTAALGCLVKDYFPEPVTVSWNSGALTSGVHTFPAVLQSSGLYSLSSVVTVPSSSLGTQTYICNVNHKPSNTKVDKKVEPKSCDKTHTCPPCPAPEAAGGPSVFLFPPKPKDTLMISRTPEVTCVVVDVSHEDPEVKFNWYVDGVEVHNAKTKPREEQYNSTYRVVSVLTVLHQDWLNGKEYKCKVSNKALGAPIEKTISKAKGQPREPQVYTLPPSREEMTKNQVSLTCLVKGFYPSDIAVEWESNGQPENNYKTTPPVLDSDGSFFLYSKLTVDKSRWQQGNVFSCSVMHEALHNHYTQKSLSLSPGK

SEQ ID NO: 5775 - protein, 473 aa, synthetic construct
MGWSCIILFLVATATGVHSEVQLVESGGGVVRPGGSLRLSCAASGFTFDDYGMSWVRQAPGKGLEWVSGINWNGGSTGYADSVKGRFTISRDNAKNSLYLQMNSLRAEDTALYYCARDGCSSTSCYGNWFDPWGQGTLVTVSSASTKGPSVFPLAPSSKSTSGGTAALGCLVKDYFPEPVTVSWNSGALTSGVHTFPAVLQSSGLYSLSSVVTVPSSSLGTQTYICNVNHKPSNTKVDKKVEPKSCDKTHTCPPCPAPEAAGGPSVFLFPPKPKDTLMISRTPEVTCVVVDVSHEDPEVKFNWYVDGVEVHNAKTKPREEQYNSTYRVVSVLTVLHQDWLNGKEYKCKVSNKALGAPIEKTISKAKGQPREPQVYTLPPSREEMTKNQVSLTCLVKGFYPSDIAVEWESNGQPENNYKTTPPVLDSDGSFFLYSKLTVDKSRWQQGNVFSCSVMHEALHNHYTQKSLSLSPGK

SEQ ID NO: 5776 - protein, 472 aa, synthetic construct
MGWSCIILFLVATATGVHSQVQLQQSGPGLVKPSQTLSLTCAISGDSVSSNSAAWNWIRQSPSRGLEWLGRTYYRSKWYSDYAVSVKSRITINPDTSKNQFSLQLNSVTPEDTAVYYCARVDFGIVGAIDYWGQGTLVTVSSASTKGPSVFPLAPSSKSTSGGTAALGCLVKDYFPEPVTVSWNSGALTSGVHTFPAVLQSSGLYSLSSVVTVPSSSLGTQTYICNVNHKPSNTKVDKKVEPKSCDKTHTCPPCPAPEAAGGPSVFLFPPKPKDTLMISRTPEVTCVVVDVSHEDPEVKFNWYVDGVEVHNAKTKPREEQYNSTYRVVSVLTVLHQDWLNGKEYKCKVSNKALGAPIEKTISKAKGQPREPQVYTLPPSREEMTKNQVSLTCLVKGFYPSDIAVEWESNGQPENNYKTTPPVLDSDGSFFLYSKLTVDKSRWQQGNVFSCSVMHEALHNHYTQKSLSLSPGK

SEQ ID NO: 5777 - protein, 473 aa, synthetic construct
MGWSCIILFLVATATGVHSEVQLVESGGGLVKPGGSLRLSCAASAFTFSNYNMNWVRQAPGKGLEWVSSISSSTSYIYYADSVKGRFTVSRDNAKNSLYLQMNSLRAEDTAVYYCARDRDDFWSGYSPYFDYWGQGTLVTVSSASTKGPSVFPLAPSSKSTSGGTAALGCLVKDYFPEPVTVSWNSGALTSGVHTFPAVLQSSGLYSLSSVVTVPSSSLGTQTYICNVNHKPSNTKVDKKVEPKSCDKTHTCPPCPAPEAAGGPSVFLFPPKPKDTLMISRTPEVTCVVVDVSHEDPEVKFNWYVDGVEVHNAKTKPREEQYNSTYRVVSVLTVLHQDWLNGKEYKCKVSNKALGAPIEKTISKAKGQPREPQVYTLPPSREEMTKNQVSLTCLVKGFYPSDIAVEWESNGQPENNYKTTPPVLDSDGSFFLYSKLTVDKSRWQQGNVFSCSVMHEALHNHYTQKSLSLSPGK

SEQ ID NO: 5778 - protein, 473 aa, synthetic construct
MGWSCIILFLVATATGVHSEVQLVESGGGLVKPGGSLRLSCAASGFTFSSYSMNWVRQAPGKGLEWVSSISSSSSYIYYADSVKGRFTISRDNAKNSLYLQMNSLRAEDTAVYYCAREKYDILTGYSPYFDYWGQGTLVTVSSASTKGPSVFPLAPSSKSTSGGTAALGCLVKDYFPEPVTVSWNSGALTSGVHTFPAVLQSSGLYSLSSVVTVPSSSLGTQTYICNVNHKPSNTKVDKKVEPKSCDKTHTCPPCPAPEAAGGPSVFLFPPKPKDTLMISRTPEVTCVVVDVSHEDPEVKFNWYVDGVEVHNAKTKPREEQYNSTYRVVSVLTVLHQDWLNGKEYKCKVSNKALGAPIEKTISKAKGQPREPQVYTLPPSREEMTKNQVSLTCLVKGFYPSDIAVEWESNGQPENNYKTTPPVLDSDGSFFLYSKLTVDKSRWQQGNVFSCSVMHEALHNHYTQKSLSLSPGK

SEQ ID NO: 5779 - protein, 473 aa, synthetic construct
MGWSCIILFLVATATGVHSEVQLVESGGGLVKPGGSLRLSCAASGFTFSNAWMSWVRQAPGKGLEWVGRIKSKTDGGTTDYAAPVKGRFTISRDDSKNTLYLQMNSLKTEDTAVYYCTTDQVSGSYGDAFDIWGQGTMVTVSSASTKGPSVFPLAPSSKSTSGGTAALGCLVKDYFPEPVTVSWNSGALTSGVHTFPAVLQSSGLYSLSSVVTVPSSSLGTQTYICNVNHKPSNTKVDKKVEPKSCDKTHTCPPCPAPEAAGGPSVFLFPPKPKDTLMISRTPEVTCVVVDVSHEDPEVKFNWYVDGVEVHNAKTKPREEQYNSTYRVVSVLTVLHQDWLNGKEYKCKVSNKALGAPIEKTISKAKGQPREPQVYTLPPSREEMTKNQVSLTCLVKGFYPSDIAVEWESNGQPENNYKTTPPVLDSDGSFFLYSKLTVDKSRWQQGNVFSCSVMHEALHNHYTQKSLSLSPGK

SEQ ID NO: 5780 - protein, 473 aa, synthetic construct
MGWSCIILFLVATATGVHSEVQLVESGGGLVQPGGSLRLSCAASGFTFSSHVMSWVRQAPGKGLEWVSVISGSESSTYYADSVKGRFTISSDNSKNTLYLQMNSLRAEDTAIYYCAKRAGSGTYYRGYYFDYWGQGTLVTVSSASTKGPSVFPLAPSSKSTSGGTAALGCLVKDYFPEPVTVSWNSGALTSGVHTFPAVLQSSGLYSLSSVVTVPSSSLGTQTYICNVNHKPSNTKVDKKVEPKSCDKTHTCPPCPAPEAAGGPSVFLFPPKPKDTLMISRTPEVTCVVVDVSHEDPEVKFNWYVDGVEVHNAKTKPREEQYNSTYRVVSVLTVLHQDWLNGKEYKCKVSNKALGAPIEKTISKAKGQPREPQVYTLPPSREEMTKNQVSLTCLVKGFYPSDIAVEWESNGQPENNYKTTPPVLDSDGSFFLYSKLTVDKSRWQQGNVFSCSVMHEALHNHYTQKSLSLSPGK

SEQ ID NO: 5781 - protein, 473 aa, synthetic construct
MGWSCIILFLVATATGVHSEVQLVESGGGVVQPGRSLRLSCAASGFTFSSYGMHWVRQAPGKGLEWVTLIWYDGSNTYYAESVKGRFTISRDNSKSTLYLHMNSLRAEDSAVYYCAGTYYYDSSGYLNYMDVWGQGTTVTVSSASTKGPSVFPLAPSSKSTSGGTAALGCLVKDYFPEPVTVSWNSGALTSGVHTFPAVLQSSGLYSLSSVVTVPSSSLGTQTYICNVNHKPSNTKVDKKVEPKSCDKTHTCPPCPAPEAAGGPSVFLFPPKPKDTLMISRTPEVTCVVVDVSHEDPEVKFNWYVDGVEVHNAKTKPREEQYNSTYRVVSVLTVLHQDWLNGKEYKCKVSNKALGAPIEKTISKAKGQPREPQVYTLPPSREEMTKNQVSLTCLVKGFYPSDIAVEWESNGQPENNYKTTPPVLDSDGSFFLYSKLTVDKSRWQQGNVFSCSVMHEALHNHYTQKSLSLSPGK

SEQ ID NO: 5782 - protein, 466 aa, synthetic construct
MGWSCIILFLVATATGVHSQLQLQESGPGLVKPSETLSLTCTVSGGSISSSSYYWGWIRQPPGKGLEWIGSIHYSGSTYYNPSLKSRVTTSVDTSKNQFSLKLSSVTAADTAVYYCASEGPYFDYWGQGTLVTVSSASTKGPSVFPLAPSSKSTSGGTAALGCLVKDYFPEPVTVSWNSGALTSGVHTFPAVLQSSGLYSLSSVVTVPSSSLGTQTYICNVNHKPSNTKVDKKVEPKSCDKTHTCPPCPAPEAAGGPSVFLFPPKPKDTLMISRTPEVTCVVVDVSHEDPEVKFNWYVDGVEVHNAKTKPREEQYNSTYRVVSVLTVLHQDWLNGKEYKCKVSNKALGAPIEKTISKAKGQPREPQVYTLPPSREEMTKNQVSLTCLVKGFYPSDIAVEWESNGQPENNYKTTPPVLDSDGSFFLYSKLTVDKSRWQQGNVFSCSVMHEALHNHYTQKSLSLSPGK

SEQ ID NO: 5783 - protein, 473 aa, synthetic construct
MGWSCIILFLVATATGVHSQVQLVQSGAEVKKPGASVKVSCKASGYSFSSYGIGWVRQAPGQGLEWMGWISGYNGNTNYAQKFQGRVTMTTDTSTSTAHMEVKSLRSDDTAAYYCARAYCGGDCYYSNAFDAWGQGTMVTVSSASTKGPSVFPLAPSSKSTSGGTAALGCLVKDYFPEPVTVSWNSGALTSGVHTFPAVLQSSGLYSLSSVVTVPSSSLGTQTYICNVNHKPSNTKVDKKVEPKSCDKTHTCPPCPAPEAAGGPSVFLFPPKPKDTLMISRTPEVTCVVVDVSHEDPEVKFNWYVDGVEVHNAKTKPREEQYNSTYRVVSVLTVLHQDWLNGKEYKCKVSNKALGAPIEKTISKAKGQPREPQVYTLPPSREEMTKNQVSLTCLVKGFYPSDIAVEWESNGQPENNYKTTPPVLDSDGSFFLYSKLTVDKSRWQQGNVFSCSVMHEALHNHYTQKSLSLSPGK

SEQ ID NO: 5784 - protein, 473 aa, synthetic construct
MGWSCIILFLVATATGVHSEVQLVESGGGLVKPGGSLRLSCAASGFTFSNAWMSWVRQAPGKGLEWVGRIKSKTDGGTTDYAAPVKGRFTISRDDSKNTLYLQMNSLKTEDTAVYYCTTDRVTIFGLARMDVWGQGTTVTVSSASTKGPSVFPLAPSSKSTSGGTAALGCLVKDYFPEPVTVSWNSGALTSGVHTFPAVLQSSGLYSLSSVVTVPSSSLGTQTYICNVNHKPSNTKVDKKVEPKSCDKTHTCPPCPAPEAAGGPSVFLFPPKPKDTLMISRTPEVTCVVVDVSHEDPEVKFNWYVDGVEVHNAKTKPREEQYNSTYRVVSVLTVLHQDWLNGKEYKCKVSNKALGAPIEKTISKAKGQPREPQVYTLPPSREEMTKNQVSLTCLVKGFYPSDIAVEWESNGQPENNYKTTPPVLDSDGSFFLYSKLTVDKSRWQQGNVFSCSVMHEALHNHYTQKSLSLSPGK

SEQ ID NO: 5785 - protein, 474 aa, synthetic construct
MGWSCIILFLVATATGVHSEVQLVESGGGLVQPGGSLRLSCAASGFTFSTYSVKWVRQAPGKGLEWVSYISSGSSTIYYADSVKGRFTISRDNAKNSLYLQMNSLRDEDTAVYYCARDPTTIFGVVPYYYMDVWGTGTTVTVSSASTKGPSVFPLAPSSKSTSGGTAALGCLVKDYFPEPVTVSWNSGALTSGVHTFPAVLQSSGLYSLSSVVTVPSSSLGTQTYICNVNHKPSNTKVDKKVEPKSCDKTHTCPPCPAPEAAGGPSVFLFPPKPKDTLMISRTPEVTCVVVDVSHEDPEVKFNWYVDGVEVHNAKTKPREEQYNSTYRVVSVLTVLHQDWLNGKEYKCKVSNKALGAPIEKTISKAKGQPREPQVYTLPPSREEMTKNQVSLTCLVKGFYPSDIAVEWESNGQPENNYKTTPPVLDSDGSFFLYSKLTVDKSRWQQGNVFSCSVMHEALHNHYTQKSLSLSPGK

SEQ ID NO: 5786 - protein, 474 aa, synthetic construct
MGWSCIILFLVATATGVHSEVQLVESGGGLVKPGGSLRLSCAASGFTFSNAWMSWVRQAPGKGLEWVGRIKSKTDGGTTDYAAPVKGRFTISRDDSKNTLYLQMNSLKTEDTAVYYCTTDRDYYGSGSYYFDYWGQGTLVTVSSASTKGPSVFPLAPSSKSTSGGTAALGCLVKDYFPEPVTVSWNSGALTSGVHTFPAVLQSSGLYSLSSVVTVPSSSLGTQTYICNVNHKPSNTKVDKKVEPKSCDKTHTCPPCPAPEAAGGPSVFLFPPKPKDTLMISRTPEVTCVVVDVSHEDPEVKFNWYVDGVEVHNAKTKPREEQYNSTYRVVSVLTVLHQDWLNGKEYKCKVSNKALGAPIEKTISKAKGQPREPQVYTLPPSREEMTKNQVSLTCLVKGFYPSDIAVEWESNGQPENNYKTTPPVLDSDGSFFLYSKLTVDKSRWQQGNVFSCSVMHEALHNHYTQKSLSLSPGK

SEQ ID NO: 5787 - protein, 467 aa, synthetic construct
MGWSCIILFLVATATGVHSQLQLQESGPGLVKPSETLSLTCTVSGGSITTRSYYWGWLRQPPGKGLEWIGTFYYSGNTYYNPSLQSRVSISVDASKNQFSLQLSSVTAADTAVFYCAREDLIGNDYWGQGTLVTVSSASTKGPSVFPLAPSSKSTSGGTAALGCLVKDYFPEPVTVSWNSGALTSGVHTFPAVLQSSGLYSLSSVVTVPSSSLGTQTYICNVNHKPSNTKVDKKVEPKSCDKTHTCPPCPAPEAAGGPSVFLFPPKPKDTLMISRTPEVTCVVVDVSHEDPEVKFNWYVDGVEVHNAKTKPREEQYNSTYRVVSVLTVLHQDWLNGKEYKCKVSNKALGAPIEKTISKAKGQPREPQVYTLPPSREEMTKNQVSLTCLVKGFYPSDIAVEWESNGQPENNYKTTPPVLDSDGSFFLYSKLTVDKSRWQQGNVFSCSVMHEALHNHYTQKSLSLSPGK

SEQ ID NO: 5788 - protein, 473 aa, synthetic construct
MGWSCIILFLVATATGVHSQVQLQQSGPGLVKPSQTLSLTCAISGDSVSSNSAAWNWIRQSPSRGLEWLGRTYYRSKWYNDYAVSVKSRITINSDTSKNQFSLQLNSVTPEDTAVYYCSRDRLIVGASYFDLWGRGTLVTVSSASTKGPSVFPLAPSSKSTSGGTAALGCLVKDYFPEPVTVSWNSGALTSGVHTFPAVLQSSGLYSLSSVVTVPSSSLGTQTYICNVNHKPSNTKVDKKVEPKSCDKTHTCPPCPAPEAAGGPSVFLFPPKPKDTLMISRTPEVTCVVVDVSHEDPEVKFNWYVDGVEVHNAKTKPREEQYNSTYRVVSVLTVLHQDWLNGKEYKCKVSNKALGAPIEKTISKAKGQPREPQVYTLPPSREEMTKNQVSLTCLVKGFYPSDIAVEWESNGQPENNYKTTPPVLDSDGSFFLYSKLTVDKSRWQQGNVFSCSVMHEALHNHYTQKSLSLSPGK

SEQ ID NO: 5789 - protein, 474 aa, synthetic construct
MGWSCIILFLVATATGVHSEVQLVESGGGVVRPGGSLRLSCAASGFTFDDYGMSWVRQAPGKGLEWVSGINWNGGSTGYADSVKGRFTISRDNAKNSLYLQMNSLRAEDTALYYCAREKAPAHRSSWSWYFDLWGRGTLVTVSSASTKGPSVFPLAPSSKSTSGGTAALGCLVKDYFPEPVTVSWNSGALTSGVHTFPAVLQSSGLYSLSSVVTVPSSSLGTQTYICNVNHKPSNTKVDKKVEPKSCDKTHTCPPCPAPEAAGGPSVFLFPPKPKDTLMISRTPEVTCVVVDVSHEDPEVKFNWYVDGVEVHNAKTKPREEQYNSTYRVVSVLTVLHQDWLNGKEYKCKVSNKALGAPIEKTISKAKGQPREPQVYTLPPSREEMTKNQVSLTCLVKGFYPSDIAVEWESNGQPENNYKTTPPVLDSDGSFFLYSKLTVDKSRWQQGNVFSCSVMHEALHNHYTQKSLSLSPGK

SEQ ID NO: 5790 - protein, 474 aa, synthetic construct
MGWSCIILFLVATATGVHSQVQLVQSGAEVKKPGASVKVSCKASGYTFTGNYIHWVRQAPGQGLEWMGWINPTSGVTNYAQKFQGRVTLTRDTSISTAYMELSRLRSDDTAVYYCTREGIAAANPGYFYYMDVWGKGTTVTVSSASTKGPSVFPLAPSSKSTSGGTAALGCLVKDYFPEPVTVSWNSGALTSGVHTFPAVLQSSGLYSLSSVVTVPSSSLGTQTYICNVNHKPSNTKVDKKVEPKSCDKTHTCPPCPAPEAAGGPSVFLFPPKPKDTLMISRTPEVTCVVVDVSHEDPEVKFNWYVDGVEVHNAKTKPREEQYNSTYRVVSVLTVLHQDWLNGKEYKCKVSNKALGAPIEKTISKAKGQPREPQVYTLPPSREEMTKNQVSLTCLVKGFYPSDIAVEWESNGQPENNYKTTPPVLDSDGSFFLYSKLTVDKSRWQQGNVFSCSVMHEALHNHYTQKSLSLSPGK

SEQ ID NO: 5791 - protein, 475 aa, synthetic construct
MGWSCIILFLVATATGVHSQVQLVQSGAEVKKPGASVKVSCKASGYTFTDYYMHWVRQAPGQGLEWMGWINPNSGGTNYAQKFQGRVTMTRDTSISTAYMELSRLRSDDTAVYFCARCDMVRGVIDHYYNYMDVWGQGTTVTVSSASTKGPSVFPLAPSSKSTSGGTAALGCLVKDYFPEPVTVSWNSGALTSGVHTFPAVLQSSGLYSLSSVVTVPSSSLGTQTYICNVNHKPSNTKVDKKVEPKSCDKTHTCPPCPAPEAAGGPSVFLFPPKPKDTLMISRTPEVTCVVVDVSHEDPEVKFNWYVDGVEVHNAKTKPREEQYNSTYRVVSVLTVLHQDWLNGKEYKCKVSNKALGAPIEKTISKAKGQPREPQVYTLPPSREEMTKNQVSLTCLVKGFYPSDIAVEWESNGQPENNYKTTPPVLDSDGSFFLYSKLTVDKSRWQQGNVFSCSVMHEALHNHYTQKSLSLSPGK

SEQ ID NO: 5792 - protein, 475 aa, synthetic construct
MGWSCIILFLVATATGVHSQLQLQESGPGLMKPSETLSLTCTVSGGSISSRSYYWGWIRQPPGKGLEWIGSVFYSGSTYYNPSLKSRVTISVDTSKNQFSLKVISVTAADTAVYYCVRQTYDSWTGYSFFYFDYWGQGTLVTVSSASTKGPSVFPLAPSSKSTSGGTAALGCLVKDYFPEPVTVSWNSGALTSGVHTFPAVLQSSGLYSLSSVVTVPSSSLGTQTYICNVNHKPSNTKVDKKVEPKSCDKTHTCPPCPAPEAAGGPSVFLFPPKPKDTLMISRTPEVTCVVVDVSHEDPEVKFNWYVDGVEVHNAKTKPREEQYNSTYRVVSVLTVLHQDWLNGKEYKCKVSNKALGAPIEKTISKAKGQPREPQVYTLPPSREEMTKNQVSLTCLVKGFYPSDIAVEWESNGQPENNYKTTPPVLDSDGSFFLYSKLTVDKSRWQQGNVFSCSVMHEALHNHYTQKSLSLSPGK

SEQ ID NO: 5793 - protein, 476 aa, synthetic construct
MGWSCIILFLVATATGVHSEVQLVESGGGLVQPGGSLKLSCAASGFTFSGSAMHWVRQASGKGLEWVGRIRSKANSYATAYAASVKGRFTISRDDSKNTAYLQMNSLKTEDTAVYYCTRPMITFGGVIVYDAFDIWGQGTMVTVSSASTKGPSVFPLAPSSKSTSGGTAALGCLVKDYFPEPVTVSWNSGALTSGVHTFPAVLQSSGLYSLSSVVTVPSSSLGTQTYICNVNHKPSNTKVDKKVEPKSCDKTHTCPPCPAPEAAGGPSVFLFPPKPKDTLMISRTPEVTCVVVDVSHEDPEVKFNWYVDGVEVHNAKTKPREEQYNSTYRVVSVLTVLHQDWLNGKEYKCKVSNKALGAPIEKTISKAKGQPREPQVYTLPPSREEMTKNQVSLTCLVKGFYPSDIAVEWESNGQPENNYKTTPPVLDSDGSFFLYSKLTVDKSRWQQGNVFSCSVMHEALHNHYTQKSLSLSPGK

SEQ ID NO: 5794 - protein, 469 aa, synthetic construct
MGWSCIILFLVATATGVHSQVQLQQWGAGLLKPSETLSLTCAVYGGSFSGYYWSWIRQPPGKGLEWIGEINHSGSTNYNPSLKSRVTISVDTSKNQFSLKLSSVTAADTAVYYCARGWGSSSWYYFDYWGQGTLVTVSSASTKGPSVFPLAPSSKSTSGGTAALGCLVKDYFPEPVTVSWNSGALTSGVHTFPAVLQSSGLYSLSSVVTVPSSSLGTQTYICNVNHKPSNTKVDKKVEPKSCDKTHTCPPCPAPEAAGGPSVFLFPPKPKDTLMISRTPEVTCVVVDVSHEDPEVKFNWYVDGVEVHNAKTKPREEQYNSTYRVVSVLTVLHQDWLNGKEYKCKVSNKALGAPIEKTISKAKGQPREPQVYTLPPSREEMTKNQVSLTCLVKGFYPSDIAVEWESNGQPENNYKTTPPVLDSDGSFFLYSKLTVDKSRWQQGNVFSCSVMHEALHNHYTQKSLSLSPGK

SEQ ID NO: 5795 - protein, 469 aa, synthetic construct
MGWSCIILFLVATATGVHSQVQLQQWGAGLLKPSETLSLTCAVYGGSFSGYYWSWIRQPPGKGLEWIGEINRSGSTNYNPSLKTRVTISVDTSKNQFSLQLSSVTAADTAVYYCARGIFGVGGNWFDPWGQGTLVTVSSASTKGPSVFPLAPSSKSTSGGTAALGCLVKDYFPEPVTVSWNSGALTSGVHTFPAVLQSSGLYSLSSVVTVPSSSLGTQTYICNVNHKPSNTKVDKKVEPKSCDKTHTCPPCPAPEAAGGPSVFLFPPKPKDTLMISRTPEVTCVVVDVSHEDPEVKFNWYVDGVEVHNAKTKPREEQYNSTYRVVSVLTVLHQDWLNGKEYKCKVSNKALGAPIEKTISKAKGQPREPQVYTLPPSREEMTKNQVSLTCLVKGFYPSDIAVEWESNGQPENNYKTTPPVLDSDGSFFLYSKLTVDKSRWQQGNVFSCSVMHEALHNHYTQKSLSLSPGK

SEQ ID NO: 5796 - protein, 469 aa, synthetic construct
MGWSCIILFLVATATGVHSQLQLQESGPGLVKPSETLSLTCTVSGGSISSSSYYWGWIRQPPGKGLEWIGSIYYSGSTYYNPSLKSRVTISVDTSKNQFSLKLSSVTAADTAVYYCARYSSSWSGFDYWGQGTLVTVSSASTKGPSVFPLAPSSKSTSGGTAALGCLVKDYFPEPVTVSWNSGALTSGVHTFPAVLQSSGLYSLSSVVTVPSSSLGTQTYICNVNHKPSNTKVDKKVEPKSCDKTHTCPPCPAPEAAGGPSVFLFPPKPKDTLMISRTPEVTCVVVDVSHEDPEVKFNWYVDGVEVHNAKTKPREEQYNSTYRVVSVLTVLHQDWLNGKEYKCKVSNKALGAPIEKTISKAKGQPREPQVYTLPPSREEMTKNQVSLTCLVKGFYPSDIAVEWESNGQPENNYKTTPPVLDSDGSFFLYSKLTVDKSRWQQGNVFSCSVMHEALHNHYTQKSLSLSPGK

SEQ ID NO: 5797 - protein, 469 aa, synthetic construct
MGWSCIILFLVATATGVHSQLQLQESGPGLVKPSETLSLTCTVSGGSISSSSYYWGWIRQPPGKGLEWIGSIYYSGSTYYNPSLKSRVTISVDTSKNQFSLKLSSVTAADTAVYYCARGGSYYVYFDYWGQGTLVTVSSASTKGPSVFPLAPSSKSTSGGTAALGCLVKDYFPEPVTVSWNSGALTSGVHTFPAVLQSSGLYSLSSVVTVPSSSLGTQTYICNVNHKPSNTKVDKKVEPKSCDKTHTCPPCPAPEAAGGPSVFLFPPKPKDTLMISRTPEVTCVVVDVSHEDPEVKFNWYVDGVEVHNAKTKPREEQYNSTYRVVSVLTVLHQDWLNGKEYKCKVSNKALGAPIEKTISKAKGQPREPQVYTLPPSREEMTKNQVSLTCLVKGFYPSDIAVEWESNGQPENNYKTTPPVLDSDGSFFLYSKLTVDKSRWQQGNVFSCSVMHEALHNHYTQKSLSLSPGK

SEQ ID NO: 5798 - protein, 477 aa, synthetic construct
MGWSCIILFLVATATGVHSEVQLVESGGGLVQPGGSLRLSCAASGFTFRSYWMSWVRQAPGKGLEWVANINQDGSEKYYVDSVKGRFTISRDNAKNSLYLHMNSLRAEDTAVYYCSRDTDCSSTSCYFNWNPFFDYWGQGTLVTVSSASTKGPSVFPLAPSSKSTSGGTAALGCLVKDYFPEPVTVSWNSGALTSGVHTFPAVLQSSGLYSLSSVVTVPSSSLGTQTYICNVNHKPSNTKVDKKVEPKSCDKTHTCPPCPAPEAAGGPSVFLFPPKPKDTLMISRTPEVTCVVVDVSHEDPEVKFNWYVDGVEVHNAKTKPREEQYNSTYRVVSVLTVLHQDWLNGKEYKCKVSNKALGAPIEKTISKAKGQPREPQVYTLPPSREEMTKNQVSLTCLVKGFYPSDIAVEWESNGQPENNYKTTPPVLDSDGSFFLYSKLTVDKSRWQQGNVFSCSVMHEALHNHYTQKSLSLSPGK

SEQ ID NO: 5799 - protein, 471 aa, synthetic construct
MGWSCIILFLVATATGVHSQLQLQESGPGLVKPSETLSLTCTVSGGSINSSNFYWGWIRQPPGKGLEWFGSIFYSGFTYYNPSLKSRVTISVDTSKNQFSLKLTSVTAADTAVYYCARGGYSYGLNWFDPWGQGTLVTVSSASTKGPSVFPLAPSSKSTSGGTAALGCLVKDYFPEPVTVSWNSGALTSGVHTFPAVLQSSGLYSLSSVVTVPSSSLGTQTYICNVNHKPSNTKVDKKVEPKSCDKTHTCPPCPAPEAAGGPSVFLFPPKPKDTLMISRTPEVTCVVVDVSHEDPEVKFNWYVDGVEVHNAKTKPREEQYNSTYRVVSVLTVLHQDWLNGKEYKCKVSNKALGAPIEKTISKAKGQPREPQVYTLPPSREEMTKNQVSLTCLVKGFYPSDIAVEWESNGQPENNYKTTPPVLDSDGSFFLYSKLTVDKSRWQQGNVFSCSVMHEALHNHYTQKSLSLSPGK

SEQ ID NO: 5800 - protein, 474 aa, synthetic construct
MGWSCIILFLVATATGVHSQLQLQESGPGLVKPSETLSLTCTVSGGSISSSSYYWGWIRQPPGKGLEWIGSIYYSGSTYYNPSLKSRVTISVDTSKNQFSLKLSSVTAADTAVYYCARTYYDFWSGYLNWFDPWGQGTLVTVSSASTKGPSVFPLAPSSKSTSGGTAALGCLVKDYFPEPVTVSWNSGALTSGVHTFPAVLQSSGLYSLSSVVTVPSSSLGTQTYICNVNHKPSNTKVDKKVEPKSCDKTHTCPPCPAPEAAGGPSVFLFPPKPKDTLMISRTPEVTCVVVDVSHEDPEVKFNWYVDGVEVHNAKTKPREEQYNSTYRVVSVLTVLHQDWLNGKEYKCKVSNKALGAPIEKTISKAKGQPREPQVYTLPPSREEMTKNQVSLTCLVKGFYPSDIAVEWESNGQPENNYKTTPPVLDSDGSFFLYSKLTVDKSRWQQGNVFSCSVMHEALHNHYTQKSLSLSPGK

SEQ ID NO: 5801 - protein, 474 aa, synthetic construct
MGWSCIILFLVATATGVHSQVQLQQWGAGLLKPSETLSLTCAVYGGSFSGYYWSWIRQPPGKGLEWIGEINRGGSTNYNPSLKSRVTISVDTSKNQFSLKLSSVTAADTAVYYCARWRNYYDSSGSPYWYFDLWGRGTLVTVSSASTKGPSVFPLAPSSKSTSGGTAALGCLVKDYFPEPVTVSWNSGALTSGVHTFPAVLQSSGLYSLSSVVTVPSSSLGTQTYICNVNHKPSNTKVDKKVEPKSCDKTHTCPPCPAPEAAGGPSVFLFPPKPKDTLMISRTPEVTCVVVDVSHEDPEVKFNWYVDGVEVHNAKTKPREEQYNSTYRVVSVLTVLHQDWLNGKEYKCKVSNKALGAPIEKTISKAKGQPREPQVYTLPPSREEMTKNQVSLTCLVKGFYPSDIAVEWESNGQPENNYKTTPPVLDSDGSFFLYSKLTVDKSRWQQGNVFSCSVMHEALHNHYTQKSLSLSPGK

SEQ ID NO: 5802 - protein, 474 aa, synthetic construct
MGWSCIILFLVATATGVHSQLQLQESGPGLVKPSETLSLTCTVSGGSISSSGYYWGWIRQSPGKGLEWIGSFYYSGSTYYNPSLKSRVTISVDTSKNQFSLKLSSVTAADTAVYYCARQGRITMVRGVIPFDYWGQGTLVTVSSASTKGPSVFPLAPSSKSTSGGTAALGCLVKDYFPEPVTVSWNSGALTSGVHTFPAVLQSSGLYSLSSVVTVPSSSLGTQTYICNVNHKPSNTKVDKKVEPKSCDKTHTCPPCPAPEAAGGPSVFLFPPKPKDTLMISRTPEVTCVVVDVSHEDPEVKFNWYVDGVEVHNAKTKPREEQYNSTYRVVSVLTVLHQDWLNGKEYKCKVSNKALGAPIEKTISKAKGQPREPQVYTLPPSREEMTKNQVSLTCLVKGFYPSDIAVEWESNGQPENNYKTTPPVLDSDGSFFLYSKLTVDKSRWQQGNVFSCSVMHEALHNHYTQKSLSLSPGK

SEQ ID NO: 5803 - protein, 477 aa, synthetic construct
MGWSCIILFLVATATGVHSQVQLQQWGAGLLKPSETLSLTCAVYGGSFSGYYWSWIRQPPGKGLEWIGEINHSGSTNYNPSLKSRVTISVDTSKNQFSLKLSSVTAADTAVYYCAGGYCSSTSCRYNWNYGGWFDPWGQGTLVTVSSASTKGPSVFPLAPSSKSTSGGTAALGCLVKDYFPEPVTVSWNSGALTSGVHTFPAVLQSSGLYSLSSVVTVPSSSLGTQTYICNVNHKPSNTKVDKKVEPKSCDKTHTCPPCPAPEAAGGPSVFLFPPKPKDTLMISRTPEVTCVVVDVSHEDPEVKFNWYVDGVEVHNAKTKPREEQYNSTYRVVSVLTVLHQDWLNGKEYKCKVSNKALGAPIEKTISKAKGQPREPQVYTLPPSREEMTKNQVSLTCLVKGFYPSDIAVEWESNGQPENNYKTTPPVLDSDGSFFLYSKLTVDKSRWQQGNVFSCSVMHEALHNHYTQKSLSLSPGK

SEQ ID NO: 5804 - protein, 235 aa, synthetic construct
MGWSCIILFLVATATGVHSQSALTQPASVSGSPGQSITISCTGTSSDVGGYNYVSWYQQHPGKAPKLMIYEVSNRPSGVSNRFSGSKSGNTASLTISGLQAEDEADYYCSSYTSSSTWVFGGGTKLTVLGQPKAAPSVTLFPPSSEELQANKATLVCLISDFYPGAVTVAWKADSSPVKAGVETTTPSKQSNNKYAASSYLSLTPEQWKSHRSYSCQVTHEGSTVEKTVAPTECS

SEQ ID NO: 5805 - protein, 239 aa, synthetic construct
MGWSCIILFLVATATGVHSQSALTQPASVSGSPGQSITISCTGTSSDVGGYNYVSWYQQHPGKAPKLMIYDVSKRPSGVSNRFSGSKSGNTASLTISGLQAEDEADYYCCSYAGRSTLGIDWVFGGGTKVTVLGQPKAAPSVTLFPPSSEELQANKATLVCLISDFYPGAVTVAWKADSSPVKAGVETTTPSKQSNNKYAASSYLSLTPEQWKSHRSYSCQVTHEGSTVEKTVAPTECS

SEQ ID NO: 5806 - protein, 231 aa, synthetic construct
MGWSCIILFLVATATGVHSSYELTQPPSVSVSPGQTASITCSGDKLGDKYACWYQQKPGQSPVLVIYQDSKRPSGIPERFSGSNSGNTATLTISGTQAMDEADYYCQAWDSSTYVFGTGTKVTVLGQPKAAPSVTLFPPSSEELQANKATLVCLISDFYPGAVTVAWKADSSPVKAGVETTTPSKQSNNKYAASSYLSLTPEQWKSHRSYSCQVTHEGSTVEKTVAPTECS

SEQ ID NO: 5807 - protein, 231 aa, synthetic construct
MGWSCIILFLVATATGVHSSYELTQPSSVSVSPGQTARITCSGDVLAKKYARWFQQKPGQAPVLVIYKDSERPSGIPERFSGSSSGTTVTLTISGAQVEDEADYYCYSAADNNLVFGGGTKLTVLGQPKAAPSVTLFPPSSEELQANKATLVCLISDFYPGAVTVAWKADSSPVKAGVETTTPSKQSNNKYAASSYLSLTPEQWKSHRSYSCQVTHEGSTVEKTVAPTECS

SEQ ID NO: 5808 - protein, 233 aa, synthetic construct
MGWSCIILFLVATATGVHSSSELTQDPAVSVALGQTVRITCQGDSLRSYYASWYQQKPGQAPVLVIYGKNNRPSGIPDRFSGSSSGNTASLTITGAQAEDEADYYCNSRDSSGNHRVFGGGTKLTVLGQPKAAPSVTLFPPSSEELQANKATLVCLISDFYPGAVTVAWKADSSPVKAGVETTTPSKQSNNKYAASSYLSLTPEQWKSHRSYSCQVTHEGSTVEKTVAPTECS

SEQ ID NO: 5809 - protein, 235 aa, synthetic construct
MGWSCIILFLVATATGVHSQSALTQPRSVSGSPGQSVTISCTGTSSDVGGYNYVSWYQQHPGKAPKLMIYDVSKRPSGVPDRFSGSKSGNTASLTISGLQAEDEADYYCCSYAGSYTWVFGGGTKLTVLGQPKAAPSVTLFPPSSEELQANKATLVCLISDFYPGAVTVAWKADSSPVKAGVETTTPSKQSNNKYAASSYLSLTPEQWKSHRSYSCQVTHEGSTVEKTVAPTECS

SEQ ID NO: 5810 - protein, 235 aa, synthetic construct
MGWSCIILFLVATATGVHSQSALTQPPSASGSPGQSVTISCTGTSSDVGGYNYVSWYQQHPGKAPKLMIYEVSKRPSGVPDRFSGSKSGNTASLTVSGLQAEDEADYYCSSYAGSNNLVFGGGTKLTVLGQPKAAPSVTLFPPSSEELQANKATLVCLISDFYPGAVTVAWKADSSPVKAGVETTTPSKQSNNKYAASSYLSLTPEQWKSHRSYSCQVTHEGSTVEKTVAPTECS

SEQ ID NO: 5811 - protein, 235 aa, synthetic construct
MGWSCIILFLVATATGVHSQSALTQPASVSGSPGQSITISCTGTSSDVGGYNYVSWYQQHPGKAPKLMIYEVSNRPSGVSNRFSGSKSGNTASLTISGLQAEDEADYYCSSYTSSSTYVFGTGTKVTVLGQPKAAPSVTLFPPSSEELQANKATLVCLISDFYPGAVTVAWKADSSPVKAGVETTTPSKQSNNKYAASSYLSLTPEQWKSHRSYSCQVTHEGSTVEKTVAPTECS

SEQ ID NO: 5812 - protein, 236 aa, synthetic construct
MGWSCIILFLVATATGVHSQSALTQPASVSGSPGQSITISCTGTSSDVGGYNYVSWYQQHPGKAPKLMIYDVSKRPSGVSNRFSGSKSGNTASLTISGLQAEDEADYYCCSYAGSSTYVVFGGGTKLTVLGQPKAAPSVTLFPPSSEELQANKATLVCLISDFYPGAVTVAWKADSSPVKAGVETTTPSKQSNNKYAASSYLSLTPEQWKSHRSYSCQVTHEGSTVEKTVAPTECS

SEQ ID NO: 5813 - protein, 233 aa, synthetic construct
MGWSCIILFLVATATGVHSSSELTQDPAVSVALGQTVRITCQGDSLRSYYASWYQQKPGQAPVLVIYGKNNRPSGIPDRFSGSSSGNTASLTITGAQAEDEADYYCNSRDSSGNHVVFGGGTKLTVLGQPKAAPSVTLFPPSSEELQANKATLVCLISDFYPGAVTVAWKADSSPVKAGVETTTPSKQSNNKYAASSYLSLTPEQWKSHRSYSCQVTHEGSTVEKTVAPTECS

SEQ ID NO: 5814 - protein, 233 aa, synthetic construct
MGWSCIILFLVATATGVHSSYVLTQPPSVSVAPGKTARITCGGNNIGSKSVHWYQQKPGQAPVLVIYYDSDRPSGIPERFSGSNSGNTATLTISRVEAGDEADYYCQVWDSSSDHPVFGGGTKLTVLGQPKAAPSVTLFPPSSEELQANKATLVCLISDFYPGAVTVAWKADSSPVKAGVETTTPSKQSNNKYAASSYLSLTPEQWKSHRSYSCQVTHEGSTVEKTVAPTECS

SEQ ID NO: 5815 - protein, 240 aa, synthetic construct
MGWSCIILFLVATATGVHSQAVLTQPASLSASPGASASLTCTLRSGINVGTYRIYWYQQKPGSPPQYLLRYKSDSDKQQGSGVPSRFSGSKDASANAGILLISGLQSEDEADYYCMIWHSSAVVFGGGTKLTVLGQPKAAPSVTLFPPSSEELQANKATLVCLISDFYPGAVTVAWKADSSPVKAGVETTTPSKQSNNKYAASSYLSLTPEQWKSHRSYSCQVTHEGSTVEKTVAPTECS

SEQ ID NO: 5816 - protein, 232 aa, synthetic construct
MGWSCIILFLVATATGVHSSSELTQDPAVSVALGQTVRITCQGDSLRSYYASWYQQKPGQAPVLVIYGKNNRPSGIPDRFSGSSSGNTASLTITGAQAEDEADYYCNSRDSSGNWVFGGGTKLTVLGQPKAAPSVTLFPPSSEELQANKATLVCLISDFYPGAVTVAWKADSSPVKAGVETTTPSKQSNNKYAASSYLSLTPEQWKSHRSYSCQVTHEGSTVEKTVAPTECS

SEQ ID NO: 5817 - protein, 234 aa, synthetic construct
MGWSCIILFLVATATGVHSSYELTQPPSVSVSPGQTARITCSGDALPKKYAYWYQQKSGQAPVLVIYEDSKRPSGIPERFSGSSSGTMATLTISGAQVEDEADYYCYSTDSSGNHSWVFGGGTKLTVLGQPKAAPSVTLFPPSSEELQANKATLVCLISDFYPGAVTVAWKADSSPVKAGVETTTPSKQSNNKYAASSYLSLTPEQWKSHRSYSCQVTHEGSTVEKTVAPTECS

SEQ ID NO: 5818 - protein, 235 aa, synthetic construct
MGWSCIILFLVATATGVHSQSALTQPASVSGSPGQSITISCTGTSSDVGGYNYVSWYQQHPGKAPKLMIYEVSNRPSGVSNRFSGSKSGNTASLTISGLQAEDEADYYCSSYTSSSTLVFGGGTKLTVLGQPKAAPSVTLFPPSSEELQANKATLVCLISDFYPGAVTVAWKADSSPVKAGVETTTPSKQSNNKYAASSYLSLTPEQWKSHRSYSCQVTHEGSTVEKTVAPTECS

SEQ ID NO: 5819 - protein, 241 aa, synthetic construct
MGWSCIILFLVATATGVHSQAVLTQPASLSASPGASASLTCTLRSGINVGTYRIYWYQQKPGSPPQYLLRYKSDSDKQQGSGVPSRFSGSKDASANAGILLISGLQSEDEADYYCMIWHSSAYVVFGGGTKLTVLGQPKAAPSVTLFPPSSEELQANKATLVCLISDFYPGAVTVAWKADSSPVKAGVETTTPSKQSNNKYAASSYLSLTPEQWKSHRSYSCQVTHEGSTVEKTVAPTECS

SEQ ID NO: 5820 - protein, 232 aa, synthetic construct
MGWSCIILFLVATATGVHSSYELTQPPSVSVSPGQTASITCSGDKLGDKYACWYQQKPGQSPVLVIYQDSKRPSGIPERFSGSNSGNTATLTISGTQAMDEADYYCQAWDSSTAWVFGGGTKLTVLGQPKAAPSVTLFPPSSEELQANKATLVCLISDFYPGAVTVAWKADSSPVKAGVETTTPSKQSNNKYAASSYLSLTPEQWKSHRSYSCQVTHEGSTVEKTVAPTECS

SEQ ID NO: 5821 - protein, 233 aa, synthetic construct
MGWSCIILFLVATATGVHSSYELTQPPSVSVSPGQTARITCSGDALPKKYAYWYQQKSGQAPVLVIYEDSKRPSGIPERFSGSSSGTMATLTISGAQVEDEADYYCYSTDSSGNHKVFGGGTKLTVLGQPKAAPSVTLFPPSSEELQANKATLVCLISDFYPGAVTVAWKADSSPVKAGVETTTPSKQSNNKYAASSYLSLTPEQWKSHRSYSCQVTHEGSTVEKTVAPTECS

SEQ ID NO: 5822 - protein, 233 aa, synthetic construct
MGWSCIILFLVATATGVHSSSELTQDPAVSVALGQTVRITCQGDSLRSYYASWYQQKPGQAPVLVIYGKNNRPSGIPDRFSGSSSGNTASLTITGAQAEDEADYYCNSRDSSGNHWVFGGGTKLTVLGQPKAAPSVTLFPPSSEELQANKATLVCLISDFYPGAVTVAWKADSSPVKAGVETTTPSKQSNNKYAASSYLSLTPEQWKSHRSYSCQVTHEGSTVEKTVAPTECS

SEQ ID NO: 5823 - protein, 234 aa, synthetic construct
MGWSCIILFLVATATGVHSQSALTQPRSVSGSPGQSVTISCTGTSSDVGGYNYVSWYQQHPGKAPKLMIYDVSKRPSGVPDRFSGSKSGNTASLTISGLQAEDEADYYCCSYAGSSWVFGGGTKLTVLGQPKAAPSVTLFPPSSEELQANKATLVCLISDFYPGAVTVAWKADSSPVKAGVETTTPSKQSNNKYAASSYLSLTPEQWKSHRSYSCQVTHEGSTVEKTVAPTECS

SEQ ID NO: 5824 - protein, 235 aa, synthetic construct
MGWSCIILFLVATATGVHSQSALTQPASVSGSPGQSITISCTGTSSDVGGYNYVSWYQQHPGKAPKLMIYEVSNRPSGVSNRFSGSKSGNTASLTISGLQAEDEADYYCSSYTSSSTLVFGTGTKVTVLGQPKAAPSVTLFPPSSEELQANKATLVCLISDFYPGAVTVAWKADSSPVKAGVETTTPSKQSNNKYAASSYLSLTPEQWKSHRSYSCQVTHEGSTVEKTVAPTECS

SEQ ID NO: 5825 - protein, 236 aa, synthetic construct
MGWSCIILFLVATATGVHSQSALTQPASVSGSPGQSITISCTGTSSDVGGYNYVSWYQQHPGKAPKLMIYDVSKRPSGVSNRFSGSKSGNTASLTISGLQAEDEADYYCCSYAGSSTFVVFGGGTKLTVLGQPKAAPSVTLFPPSSEELQANKATLVCLISDFYPGAVTVAWKADSSPVKAGVETTTPSKQSNNKYAASSYLSLTPEQWKSHRSYSCQVTHEGSTVEKTVAPTECS

SEQ ID NO: 5826 - protein, 236 aa, synthetic construct; identical to SEQ ID NO: 5825

SEQ ID NO: 5827 - protein, 239 aa, synthetic construct
MGWSCIILFLVATATGVHSQSALTQPASVSGSPGQSITISCTGTSSDVGGYNYVSWYQQHPGKAPKLMIYDVSKRPSGVSNRFSGSKSGNTASLTISGLQAEDEADYYCCSYAGSSTLGIDWVFGGGTKLTVLGQPKAAPSVTLFPPSSEELQANKATLVCLISDFYPGAVTVAWKADSSPVKAGVETTTPSKQSNNKYAASSYLSLTPEQWKSHRSYSCQVTHEGSTVEKTVAPTECS

SEQ ID NO: 5828 - protein, 240 aa, synthetic construct
MGWSCIILFLVATATGVHSQAVLTQPPSASALLGASIKLTCTLSSEHSTYTIEWYQQRPGRSPQYIMKVKSDGSHSKGDGIPDRFMGSSSGADRYLTFSNLQSDDEAEYHCGESHTIDGQVGVVFGGGTKLTVLGQPKAAPSVTLFPPSSEELQANKATLVCLISDFYPGAVTVAWKADSSPVKAGVETTTPSKQSNNKYAASSYLSLTPEQWKSHRSYSCQVTHEGSTVEKTVAPTECS

SEQ ID NO: 5829 - protein, 240 aa, synthetic construct
MGWSCIILFLVATATGVHSQAVLTQPPSASALLGASIKLTCTLSSEHSTYTIEWYQQRPGRSPQYIMKVKSDGSHSKGDGIPDRFMGSSSGADRYLTFSNLQSDDEAEYHCGESHTIDGQVGWVFGGGTKLTVLGQPKAAPSVTLFPPSSEELQANKATLVCLISDFYPGAVTVAWKADSSPVKAGVETTTPSKQSNNKYAASSYLSLTPEQWKSHRSYSCQVTHEGSTVEKTVAPTECS

SEQ ID NO: 5830 - protein, 233 aa, synthetic construct; identical to SEQ ID NO: 5813

SEQ ID NO: 5831 - protein, 233 aa, synthetic construct
MGWSCIILFLVATATGVHSSYVLTQPPSVSVPPGKTARITCGGNNVGSKSVHWYQQKPGQAPVLVIYYDTDRPSGIPERFSGSNSGNTATLSISRVEAGDEADYYCQVWDSRSDHVVFGGGTKLTVLGQPKAAPSVTLFPPSSEELQANKATLVCLISDFYPGAVTVAWKADSSPVKAGVETTTPSKQSNNKYAASSYLSLTPEQWKSHRSYSCQVTHEGSTVEKTVAPTECS

SEQ ID NO: 5832 - protein, 233 aa, synthetic construct
MGWSCIILFLVATATGVHSSYVLTQPPSVSVAPGKTARITCGGNTFGSKTVHWYQQKPGQAPVLVIYYDSDRPSGIPERFSGSNSGNTATLTISRVEAGDEADYYCQVWDLYSAHVVFGGGTQLTVLGQPKAAPSVTLFPPSSEELQANKATLVCLISDFYPGAVTVAWKADSSPVKAGVETTTPSKQSNNKYAASSYLSLTPEQWKSHRSYSCQVTHEGSTVEKTVAPTECS

SEQ ID NO: 5833 - protein, 233 aa, synthetic construct
MGWSCIILFLVATATGVHSSYELTQPPSVSVSPGQTARITCSGDALPKKYAYWYQQKSGQAPVLVIYEDSKRPSGIPERFSGSSSGTMATLTISGAQVEDEADYYCYSTDSSGNHWVFGGGTKLTVLGQPKAAPSVTLFPPSSEELQANKATLVCLISDFYPGAVTVAWKADSSPVKAGVETTTPSKQSNNKYAASSYLSLTPEQWKSHRSYSCQVTHEGSTVEKTVAPTECS

SEQ ID NO: 5834 - protein, 234 aa, synthetic construct
MGWSCIILFLVATATGVHSQSALTQPASVSGSPGQSITISCTGTSSDVGGYNYVSWYQQHPGKAPKLMIYEVSNRPSGVSNRFSGSKSGNTASLTISGLQAEDEADYYCSSYTSSSTVFGGGTKLTVLGQPKAAPSVTLFPPSSEELQANKATLVCLISDFYPGAVTVAWKADSSPVKAGVETTTPSKQSNNKYAASSYLSLTPEQWKSHRSYSCQVTHEGSTVEKTVAPTECS

SEQ ID NO: 5835 - protein, 235 aa, synthetic construct
MGWSCIILFLVATATGVHSQSALTQPPSASGSPGQSVTISCTGTSSDVGGYNYVSWYQQHPGKAPKLMIYEVIKRPSGVPDRFSGSKSGNTASLTVSGLQAEDEADYYCSAYAGSNNVVFGGGTQLTVLGQPKAAPSVTLFPPSSEELQANKATLVCLISDFYPGAVTVAWKADSSPVKAGVETTTPSKQSNNKYAASSYLSLTPEQWKSHRSYSCQVTHEGSTVEKTVAPTECS

SEQ ID NO: 5836 - protein, 235 aa, synthetic construct
MGWSCIILFLVATATGVHSQSVLTQPPSASGTPGQRVTISCSGSSSNIGSNTVNWYQQLPGTAPKLLIYSNNQRPSGVPDRFSGSKSGTSASLAISGLQSEDEADYYCAAWDDSLNGWVFGGGTKLTVLGQPKAAPSVTLFPPSSEELQANKATLVCLISDFYPGAVTVAWKADSSPVKAGVETTTPSKQSNNKYAASSYLSLTPEQWKSHRSYSCQVTHEGSTVEKTVAPTECS

SEQ ID NO: 5837 - protein, 232 aa, synthetic construct
MGWSCIILFLVATATGVHSSYELTQPPSVSVSPGQTARITCSADALPKQYAYWYQQKPGQAPVLVIYKDSERPSGIPERFSGSSSGTTVTLTISGVQAEDEADYYCQSADSSATWVFGGGTKLTVLGQPKAAPSVTLFPPSSEELQANKATLVCLISDFYPGAVTVAWKADSSPVKAGVETTTPSKQSNNKYAASSYLSLTPEQWKSHRSYSCQVTHEGSTVEKTVAPTECS

SEQ ID NO: 5838 - protein, 233 aa, synthetic construct
MGWSCIILFLVATATGVHSSYELTQPPSVSVSPGQTARITCSGDALPKKYAYWYQQKSGQAPVLVIYEDSKRPSGIPERFSGSSSGTMATLTISGAQVEDEADYYCYSTDSSGNHRVFGGGTKLTVLGQPKAAPSVTLFPPSSEELQANKATLVCLISDFYPGAVTVAWKADSSPVKAGVETTTPSKQSNNKYAASSYLSLTPEQWKSHRSYSCQVTHEGSTVEKTVAPTECS

SEQ ID NO: 5839 - protein, 233 aa, synthetic construct
MGWSCIILFLVATATGVHSSYELTQPPSVSVSPGQTARITCSADALPKQYAYWYQQKPGQAPVVVIYKDSERPSGIPERFSGSSSGTTVTLTISGVQAEDEADYYCQSLDSSGTYWVFGGGTKLTVLGQPKAAPSVTLFPPSSEELQANKATLVCLISDFYPGAVTVAWKADSSPVKAGVETTTPSKQSNNKYAASSYLSLTPEQWKSHRSYSCQVTHEGSTVEKTVAPTECS

SEQ ID NO: 5840 - protein, 231 aa, synthetic construct
MGWSCIILFLVATATGVHSSYELTQPPSVSVSPGQTASITCSGDKLGDKYACWYQQKPGQSPVLVIYQDSKRPSGIPERFSGSNSGNTATLTISGTQAMDEADYYCQAWDSSTVVFGGGTKLTVLGQPKAAPSVTLFPPSSEELQANKATLVCLISDFYPGAVTVAWKADSSPVKAGVETTTPSKQSNNKYAASSYLSLTPEQWKSHRSYSCQVTHEGSTVEKTVAPTECS

SEQ ID NO: 5841 - protein, 231 aa, synthetic construct; identical to SEQ ID NO: 5840

SEQ ID NO: 5842 - protein, 231 aa, synthetic construct; identical to SEQ ID NO: 5840

SEQ ID NO: 5843 - protein, 233 aa, synthetic construct; identical to SEQ ID NO: 5822

SEQ ID NO: 5844 - protein, 233 aa, synthetic construct
MGWSCIILFLVATATGVHSQSALTQPASVSGSPGQSITISCTGTSSDVGGYNYVSWYQQHPGKAPKLMIYDVSKRPSGVSNRFSGSKSGNTASLTISGLQAEDEADYYCCSYAGSVVFGGGTKLTVLGQPKAAPSVTLFPPSSEELQANKATLVCLISDFYPGAVTVAWKADSSPVKAGVETTTPSKQSNNKYAASSYLSLTPEQWKSHRSYSCQVTHEGSTVEKTVAPTECS

SEQ ID NO: 5845 - protein, 233 aa, synthetic construct; identical to SEQ ID NO: 5813

SEQ ID NO: 5846 - protein, 233 aa, synthetic construct; identical to SEQ ID NO: 5822

SEQ ID NO: 5847 - protein, 235 aa, synthetic construct
MGWSCIILFLVATATGVHSQSVLTQPPSVSEAPRQRVTISCSGSSSNIGNNAVNWYQQLPGKAPKLLIYYDDLLPSGVSDRFSGSKSGTSASLAISGLQSEDEADYYCAAWDDRLNGPVFGGGTKLTVLGQPKAAPSVTLFPPSSEELQANKATLVCLISDFYPGAVTVAWKADSSPVKAGVETTTPSKQSNNKYAASSYLSLTPEQWKSHRSYSCQVTHEGSTVEKTVAPTECS

SEQ ID NO: 5848 - protein, 235 aa, synthetic construct
MGWSCIILFLVATATGVHSQSALTQPASVSGSPGQSITISCTGTSSDVGGYNYVSWYQQHPGKAPKLMIYDVSKRPSGVSNRFSGSKSGNTASLTISGLQAEDETDYYCCSYAGSSTLVFGGGTKLTVLGQPKAAPSVTLFPPSSEELQANKATLVCLISDFYPGAVTVAWKADSSPVKAGVETTTPSKQSNNKYAASSYLSLTPEQWKSHRSYSCQVTHEGSTVEKTVAPTECS

SEQ ID NO: 5849 - protein, 229 aa, synthetic construct
MGWSCIILFLVATATGVHSSYELTQPPSVSVSPGQTASITCSGDKLGDKHACWYQQKPGQSPMLVIYQDSKRPSGIPERFSGSNSGNTATLTISGTQPMDEADYYCQAWDSSTFGGGTKLTVLGQPKAAPSVTLFPPSSEELQANKATLVCLISDFYPGAVTVAWKADSSPVKAGVETTTPSKQSNNKYAASSYLSLTPEQWKSHRSYSCQVTHEGSTVEKTVAPTECS

SEQ ID NO: 5850 - protein, 231 aa, synthetic construct
MGWSCIILFLVATATGVHSSYELTQPSSVSVSPGQTARITCSGDVLAKKYARWFQQKPGQAPVLVIYKDSERPSGIPERFSGSSSGTTVTLTISGAQVEDEADYYCYSAADNNRVFGGGTKLTVLGQPKAAPSVTLFPPSSEELQANKATLVCLISDFYPGAVTVAWKADSSPVKAGVETTTPSKQSNNKYAASSYLSLTPEQWKSHRSYSCQVTHEGSTVEKTVAPTECS

SEQ ID NO: 5851 - protein, 231 aa, synthetic construct; identical to SEQ ID NO: 5807

SEQ ID NO: 5852 - protein, 231 aa, synthetic construct
MGWSCIILFLVATATGVHSSYELTQPSSVSVSPGQTARITCSGDVLAKKYARWFQQKPGQAPVLVIYKDSERPSGIPERFSGSSSGTTVTLTISGAQVEDEADYYCYSAADNNYVFGTGTKVTVLGQPKAAPSVTLFPPSSEELQANKATLVCLISDFYPGAVTVAWKADSSPVKAGVETTTPSKQSNNKYAASSYLSLTPEQWKSHRSYSCQVTHEGSTVEKTVAPTECS

SEQ ID NO: 5853 - protein, 231 aa, synthetic construct; identical to SEQ ID NO: 5807

SEQ ID NO: 5854 - protein, 233 aa, synthetic construct
MGWSCIILFLVATATGVHSSSELTQDPAVSVALGQTVRITCQGDRLRSYYASWYQQKPGQAPVLVIYGKNNRPSGIPDRFSGSSSGNTASLTITGAQAEDEADYHCNSRDSSGNHLVFGGGTKLTVLGQPKAAPSVTLFPPSSEELQANKATLVCLISDFYPGAVTVAWKADSSPVKAGVETTTPSKQSNNKYAASSYLSLTPEQWKSHRSYSCQVTHEGSTVEKTVAPTECS

SEQ ID NO: 5855 - protein, 233 aa, synthetic construct
MGWSCIILFLVATATGVHSSSELTQDPAVSVALGQTVRITCQGDSLRSYYASWYQQKPGQAPVLVIYGKNNRPSGIPDRFSGSSSGNTASLTITGAQAEDEADYYCNSRDSSGNHLVFGGGTKLTVLGQPKAAPSVTLFPPSSEELQANKATLVCLISDFYPGAVTVAWKADSSPVKAGVETTTPSKQSNNKYAASSYLSLTPEQWKSHRSYSCQVTHEGSTVEKTVAPTECS

SEQ ID NO: 5856 - protein, 233 aa, synthetic construct
MGWSCIILFLVATATGVHSSYVLTQPPSVSVAPGKTARITCGGNNIGSKSVHWYQQKPGQAPVLVIYYDSDRPSGIPERFSGSNSGNTATLTISRVEAGDEADYYCQVWDSSSDHVVFGGGTKLTVLGQPKAAPSVTLFPPSSEELQANKATLVCLISDFYPGAVTVAWKADSSPVKAGVETTTPSKQSNNKYAASSYLSLTPEQWKSHRSYSCQVTHEGSTVEKTVAPTECS

SEQ ID NO: 5857 - protein, 233 aa, synthetic construct; identical to SEQ ID NO: 5838

SEQ ID NO: 5858 - protein, 234 aa, synthetic construct
MGWSCIILFLVATATGVHSQTVVTQEPSLTVSPGGTVTLTCASSTGAVTSGYYPNWFQQKPGQAPRALIYSTSNKHSWTPARFSGSLLGGKAALTLSGVQPEDEAEYYCLLYYGGARVFGGGTKLTVLGQPKAAPSVTLFPPSSEELQANKATLVCLISDFYPGAVTVAWKADSSPVKAGVETTTPSKQSNNKYAASSYLSLTPEQWKSHRSYSCQVTHEGSTVEKTVAPTECS

SEQ ID NO: 5859 - protein, 235 aa, synthetic construct; identical to SEQ ID NO: 5810

SEQ ID NO: 5860 - protein, 235 aa, synthetic construct
MGWSCIILFLVATATGVHSQSALTQPASVSGSPGQSITISCTGTSSDVGGYNYVSWYQQHPGKAPKLMIYDVSKRPSGVSNRFSGSKSGNTASLTISGLQAEDEADYYCCSYAGSSTWVFGGGTKLTVLGQPKAAPSVTLFPPSSEELQANKATLVCLISDFYPGAVTVAWKADSSPVKAGVETTTPSKQSNNKYAASSYLSLTPEQWKSHRSYSCQVTHEGSTVEKTVAPTECS

SEQ ID NO: 5861 - protein, 236 aa, synthetic construct
MGWSCIILFLVATATGVHSQSALTQPASVSGSPGQSITISCTGTSSDVGGYNYVSWYQQHPGKAPKLMIYDVSKRPSGVSNRFSGSKSGNTASLTISGLQAEDEADYYCCSYAGSSTFWVFGGGTKLTVLGQPKAAPSVTLFPPSSEELQANKATLVCLISDFYPGAVTVAWKADSSPVKAGVETTTPSKQSNNKYAASSYLSLTPEQWKSHRSYSCQVTHEGSTVEKTVAPTECS

SEQ ID NO: 5862 - protein, 231 aa, synthetic construct; identical to SEQ ID NO: 5840

SEQ ID NO: 5863 - protein, 232 aa, synthetic construct
MGWSCIILFLVATATGVHSSYELTQPPSVSVSPGQTASITCSGDKLGDKYACWYQQRPGQSPVLVIYQDNKRPSGIPERFSGSNSGNTATLTISGTQAMDEADYYCQAWDSSTALVFGGGTKLTVLGQPKAAPSVTLFPPSSEELQANKATLVCLISDFYPGAVTVAWKADSSPVKAGVETTTPSKQSNNKYAASSYLSLTPEQWKSHRSYSCQVTHEGSTVEKTVAPTECS

SEQ ID NO: 5864 - protein, 232 aa, synthetic construct
MGWSCIILFLVATATGVHSSYELTQPPSVSVSPGQTASITCSGDKLGDKYACWYQQKPGQSPVLVIYQDSKRPSGIPERFSGSNSGNTATLTISGTQAMDEADYYCQAWDSSTSGVFGGGTKLTVLGQPKAAPSVTLFPPSSEELQANKATLVCLISDFYPGAVTVAWKADSSPVKAGVETTTPSKQSNNKYAASSYLSLTPEQWKSHRSYSCQVTHEGSTVEKTVAPTECS

SEQ ID NO: 5865 - protein, 233 aa, synthetic construct; identical to SEQ ID NO: 5822

SEQ ID NO: 5866 - protein, 233 aa, synthetic construct; identical to SEQ ID NO: 5838

SEQ ID NO: 5867 - protein, 233 aa, synthetic construct; identical to SEQ ID NO: 5813

SEQ ID NO: 5868 - protein, 233 aa, synthetic construct
MGWSCIILFLVATATGVHSSYELTQPPSVSVSPGQTARITCSGDALPKKYAYWYQQKSGQAPVLVIYEDSKRPSGIPERFSGSSSGTMATLTISGAQVEDEADYYCYSTDSSGNHAVFGGGTQLTVLGQPKAAPSVTLFPPSSEELQANKATLVCLISDFYPGAVTVAWKADSSPVKAGVETTTPSKQSNNKYAASSYLSLTPEQWKSHRSYSCQVTHEGSTVEKTVAPTECS

SEQ ID NO: 5869 - protein, 233 aa, synthetic construct; identical to SEQ ID NO: 5856

SEQ ID NO: 5870 - protein, 235 aa, synthetic construct
MGWSCIILFLVATATGVHSQSVLTQPPSAFGTPGQRVTISCSGSISNLGSNTVNWYQQLPGTAPKLLIYSNNQRPSGVPDRFSGSKSGTSASLAISGLQFEDEADYHCATWDDSLNGRVFGGGTKLTVLGQPKAAPSVTLFPPSSEELQANKATLVCLISDFYPGAVTVAWKADSSPVKAGVETTTPSKQSNNKYAASSYLSLTPEQWKSHRSYSCQVTHEGSTVEKTVAPTECS

SEQ ID NO: 5871 - protein, 235 aa, synthetic construct; identical to SEQ ID NO: 5810

SEQ ID NO: 5872 - protein, 235 aa, synthetic construct
MGWSCIILFLVATATGVHSQSALTQPPSASGSPGQSVTISCTGTSSDVGGYNYVSWYQQHPGKAPKLMIYEVSKRPSGVPDRFSGSKSGNTASLTVSGLQAEDEADYYCSSYAGSNNWVFGGGTKLTVLGQPKAAPSVTLFPPSSEELQANKATLVCLISDFYPGAVTVAWKADSSPVKAGVETTTPSKQSNNKYAASSYLSLTPEQWKSHRSYSCQVTHEGSTVEKTVAPTECS

SEQ ID NO: 5873 - protein, 235 aa, synthetic construct
MGWSCIILFLVATATGVHSQSALTQPASVSGSPGQSITISCTGTSSDVGGYNYVSWYQQHPGKAPKLMIYDVSKRPSGVSNRFSGSKSGNTASLTISGLQAEDEADYYCCSYAGSSTLVFGGGTKLTVLGQPKAAPSVTLFPPSSEELQANKATLVCLISDFYPGAVTVAWKADSSPVKAGVETTTPSKQSNNKYAASSYLSLTPEQWKSHRSYSCQVTHEGSTVEKTVAPTECS

SEQ ID NO: 5874 - protein, 235 aa, synthetic construct; identical to SEQ ID NO: 5860

SEQ ID NO: 5875 - protein, 236 aa, synthetic construct
MGWSCIILFLVATATGVHSQSALTQPPSASGSPGQSVTISCTGTSSDVGGYNYVSWYQQHPGKAPKLMIYEVSKRPSGVPDRFSGSKSGNTASLTVSGLQAEDEADYYCSSYAGSNNFVVFGGGTKLTVLGQPKAAPSVTLFPPSSEELQANKATLVCLISDFYPGAVTVAWKADSSPVKAGVETTTPSKQSNNKYAASSYLSLTPEQWKSHRSYSCQVTHEGSTVEKTVAPTECS

SEQ ID NO: 5876 - protein, 236 aa, synthetic construct
MGWSCIILFLVATATGVHSQSVLTQPPSVSGAPGQRVTISCTGSSSNIGAGYDVHWYQQLPGTAPKLLIYGNSNRPSGVPDRFSGSKSGTSASLAITGLQAEDEADYYCQSYDSSLSDVVFGGGTKLTVLGQPKAAPSVTLFPPSSEELQANKATLVCLISDFYPGAVTVAWKADSSPVKAGVETTTPSKQSNNKYAASSYLSLTPEQWKSHRSYSCQVTHEGSTVEKTVAPTECS

SEQ ID NO: 5877 - protein, 236 aa, synthetic construct
MGWSCIILFLVATATGVHSQSVLTQPPSVSGAPGQRVTISCTGSSSNIGAGYDVHWYQQLPGTAPKLLIYGNNNRPSGVPDRFSGSKSGTSASLAITGLQAEDEADYYCQSYDSSLSGWVFGGGTKLTVLGQPKAAPSVTLFPPSSEELQANKATLVCLISDFYPGAVTVAWKADSSPVKAGVETTTPSKQSNNKYAASSYLSLTPEQWKSHRSYSCQVTHEGSTVEKTVAPTECS

SEQ ID NO: 5878 - protein, 240 aa, synthetic construct
MGWSCIILFLVATATGVHSQAVLTQPASLSASPGASASLTCTLRSGINVGTYRIYWYQQKPGSPPQYLLRYKSDSDKQQGSGVPSRFSGSKDASANAGILLISGLQSEDEADYYCMIWHSSAWVFGGGTKLTVLGQPKAAPSVTLFPPSSEELQANKATLVCLISDFYPGAVTVAWKADSSPVKAGVETTTPSKQSNNKYAASSYLSLTPEQWKSHRSYSCQVTHEGSTVEKTVAPTECS

SEQ ID NO: 5879 - protein, 240 aa, synthetic construct; identical to SEQ ID NO: 5878

SEQ ID NO: 5880 - protein, 232 aa, synthetic construct
MGWSCIILFLVATATGVHSSYELTQPLSVSVALGQSAMITCRGNNIGSQNVHWYHQKPGQAPVLVIYRNINRPSGIPERFSGSTSGTTATLTISRAQAGDEADYYCQVWDSSGSWVFGGGTKLTVLGQPKAAPSVTLFPPSSEELQANKATLVCLISDFYPGAVTVAWKADSSPVKAGVETTTPSKQSNNKYAASSYLSLTPEQWKSHRSYSCQVTHEGSTVEKTVAPTECS

SEQ ID NO: 5881 - protein, 233 aa, synthetic construct; identical to SEQ ID NO: 5838

SEQ ID NO: 5882 - protein, 233 aa, synthetic construct
MGWSCIILFLVATATGVHSSSELTQDPALSVALGQTVRITCQGDSLRSFYASWYQQKPGQAPVLVIYGKSNRPSGIPDRFSGSGSGNTASLTITGAQAEDEADFYCNSRDTSGNYLVFGGGTKLTVLGQPKAAPSVTLFPPSSEELQANKATLVCLISDFYPGAVTVAWKADSSPVKAGVETTTPSKQSNNKYAASSYLSLTPEQWKSHRSYSCQVTHEGSTVEKTVAPTECS

SEQ ID NO: 5883 - protein, 233 aa, synthetic construct; identical to SEQ ID NO: 5822

SEQ ID NO: 5884 - protein, 233 aa, synthetic construct
MGWSCIILFLVATATGVHSSYELTQPPSVSVSPGQTARITCSGDALPKKYAYWYQQKSGQAPVLVIYEDSKRPSGIPERFSGSSSGTMATLTISGAQVEDEADYYCYSTDSSGNHVVFGGGTKLTVLGQPKAAPSVTLFPPSSEELQANKATLVCLISDFYPGAVTVAWKADSSPVKAGVETTTPSKQSNNKYAASSYLSLTPEQWKSHRSYSCQVTHEGSTVEKTVAPTECS

SEQ ID NO: 5885 - protein, 233 aa, synthetic construct; identical to SEQ ID NO: 5855

SEQ ID NO: 5886 - protein, 233 aa, synthetic construct; identical to SEQ ID NO: 5838

SEQ ID NO: 5887 - protein, 234 aa, synthetic construct
MGWSCIILFLVATATGVHSQTVVTQEPSLTVSPGGTVTLTCASSTGAVTSGYYPNWFQQKPGQTPRALIYSTSNKHSWTPARFSGSLLGGKAALTLSGVQPEDEAEYYCLLYYGGAWVFGGGTKLTVLGQPKAAPSVTLFPPSSEELQANKATLVCLISDFYPGAVTVAWKADSSPVKAGVETTTPSKQSNNKYAASSYLSLTPEQWKSHRSYSCQVTHEGSTVEKTVAPTECS

SEQ ID NO: 5888 - protein, 235 aa, synthetic construct
MGWSCIILFLVATATGVHSQSALTQPASVSGSPGQSITISCTGTSSDVGGYNYVSWYQHHPGKAPKLMIYEVSNRPSGVSNRFSGSKSGNTASLTISGLQAEDEADYYCSSYTSSSTWVFGGGTKLTVLGQPKAAPSVTLFPPSSEELQANKATLVCLISDFYPGAVTVAWKADSSPVKAGVETTTPSKQSNNKYAASSYLSLTPEQWKSHRSYSCQVTHEGSTVEKTVAPTECS

SEQ ID NO: 5889 - protein, 235 aa, synthetic construct; identical to SEQ ID NO: 5836

SEQ ID NO: 5890 - protein, 235 aa, synthetic construct; identical to SEQ ID NO: 5872

SEQ ID NO: 5891 - protein, 235 aa, synthetic construct; identical to SEQ ID NO: 5873

SEQ ID NO: 5892 - protein, 235 aa, synthetic construct; identical to SEQ ID NO: 5860

SEQ ID NO: 5893 - protein, 236 aa, synthetic construct
MGWSCIILFLVATATGVHSQSALTQPPSASGSPGQSVTISCTGTSSDVGGYNYVSWYQQHPGKAPKLMIYEVSKRPSGVPDRFSGSKSGNTASLTVSGLQAEDEADYYCSSYAGSNNFEVFGGGTKLTVLGQPKAAPSVTLFPPSSEELQANKATLVCLISDFYPGAVTVAWKADSSPVKAGVETTTPSKQSNNKYAASSYLSLTPEQWKSHRSYSCQVTHEGSTVEKTVAPTECS

SEQ ID NO: 5894 - protein, 240 aa, synthetic construct; identical to SEQ ID NO: 5878

SEQ ID NO: 5895 - protein, 231 aa, synthetic construct
MGWSCIILFLVATATGVHSSYELTQPPSVSVSPGQTASITCSGDKLGDKYACWYQQKPGQSPVVVIYQDSKRPSGIPERFSGSNSGNTATLTISGTQAMDEADYYCQAWDSSTVVFGGGTKLTVLGQPKAAPSVTLFPPSSEELQANKATLVCLISDFYPGAVTVAWKADSSPVKAGVETTTPSKQSNNKYAASSYLSLTPEQWKSHRSYSCQVTHEGSTVEKTVAPTECS

SEQ ID NO: 5896 - protein, 231 aa, synthetic construct
MGWSCIILFLVATATGVHSSYELTQPPSVSVSPGQTARITCSADALPKQYAYWYQQKPGQAPVLVIYKDSERPSGIPERFSGSSSGTSVTLTISGVQAEDEADYYCQSANSGTWVFGGGTKLTVLGQPKAAPSVTLFPPSSEELQANKATLVCLISDFYPGAVTVAWKADSSPVKAGVETTTPSKQSNNKYAASSYLSLTPEQWKSHRSYSCQVTHEGSTVEKTVAPTECS

SEQ ID NO: 5897 - protein, 231 aa, synthetic construct
MGWSCIILFLVATATGVHSSYELTQPPSVSVSPGQTASITCSGDKLGDKYACWYQQKPGQSPVLVIYQDTKRPSGIPERFSGSNSGNTATLTISGTQAMDEADYYCQAWDSSTVVFGGGTKLTVLGQPKAAPSVTLFPPSSEELQANKATLVCLISDFYPGAVTVAWKADSSPVKAGVETTTPSKQSNNKYAASSYLSLTPEQWKSHRSYSCQVTHEGSTVEKTVAPTECS

SEQ ID NO: 5898 - protein, 232 aa, synthetic construct
MGWSCIILFLVATATGVHSSYELTQPPSVSVSPGQTARITCSADALPNQYAYWYQQKPGQAPVLVIYKDSERPSGIPERFSGSSSGTTVTLTISGVQAEDEADYYCQSADSSGTWVFGGGTKLTVLGQPKAAPSVTLFPPSSEELQANKATLVCLISDFYPGAVTVAWKADSSPVKAGVETTTPSKQSNNKYAASSYLSLTPEQWKSHRSYSCQVTHEGSTVEKTVAPTECS

SEQ ID NO: 5899 - protein, 233 aa, synthetic construct; identical to SEQ ID NO: 5813

SEQ ID NO: 5900 - protein, 233 aa, synthetic construct; identical to SEQ ID NO: 5838

SEQ ID NO: 5901 - protein, 233 aa, synthetic construct; identical to SEQ ID NO: 5855

SEQ ID NO: 5902 - protein, 233 aa, synthetic construct; identical to SEQ ID NO: 5838

SEQ ID NO: 5903 - protein, 233 aa, synthetic construct; identical to SEQ ID NO: 5838

SEQ ID NO: 5904 - protein, 233 aa, synthetic construct; identical to SEQ ID NO: 5838

SEQ ID NO: 5905 - protein, 233 aa, synthetic construct
MGWSCIILFLVATATGVHSSYVLTQPPSVSVAPGKTARITCGGNNIGSKSVHWYQQTPGQAPVLVIYYDSDRPSGIPDRFSGSNSGNTATLTISRVEAGDEADYYCQVWDSNSDHWVFGGGTKLTVLGQPKAAPSVTLFPPSSEELQANKATLVCLISDFYPGAVTVAWKADSSPVKAGVETTTPSKQSNNKYAASSYLSLTPEQWKSHRSYSCQVTHEGSTVEKTVAPTECS

SEQ ID NO: 5906 - protein, 233 aa, synthetic construct
MGWSCIILFLVATATGVHSSYELTQPPSVSVSPGQTARITCSADALPKQYAYWYQQKPGQAPVLVIYKDSERPSGIPERFSGSSSGTTVTLTISGVQAEDEADYYCQSADSSGTYPVFGGGTKLTVLGQPKAAPSVTLFPPSSEELQANKATLVCLISDFYPGAVTVAWKADSSPVKAGVETTTPSKQSNNKYAASSYLSLTPEQWKSHRSYSCQVTHEGSTVEKTVAPTECS

SEQ ID NO: 5907 - protein, 233 aa, synthetic construct; identical to SEQ ID NO: 5822

SEQ ID NO: 5908 - protein, 234 aa, synthetic construct
MGWSCIILFLVATATGVHSQTVVTQEPSLTVSPGGTVTLTCGSSTGAVTSGHYPYWFQQKPGQAPRTLIYDTSNKHSWTPARFSGSLLGGKAALTLSGAQPEDEAEYYCLLSYSGARVFGGGTKLTVLGQPKAAPSVTLFPPSSEELQANKATLVCLISDFYPGAVTVAWKADSSPVKAGVETTTPSKQSNNKYAASSYLSLTPEQWKSHRSYSCQVTHEGSTVEKTVAPTECS

SEQ ID NO: 5909 - protein, 235 aa, synthetic construct; identical to SEQ ID NO: 5810

SEQ ID NO: 5910 - protein, 235 aa, synthetic construct
MGWSCIILFLVATATGVHSQSALTQPASVSGSPGQSITISCTGTSSDVGGYNYVSWYQQHPGKAPKLMIYDVSKRPSGVSNRFSGSKSGNTASLTISGLQAEDEADYYCCSYAGSSTYVFGTGTKVTVLGQPKAAPSVTLFPPSSEELQANKATLVCLISDFYPGAVTVAWKADSSPVKAGVETTTPSKQSNNKYAASSYLSLTPEQWKSHRSYSCQVTHEGSTVEKTVAPTECS

SEQ ID NO: 5911 - protein, 235 aa, synthetic construct
MGWSCIILFLVATATGVHSQSALTQPASVSGSPGQSITISCTGTSSDVGGYNYVSWYQQHPGKAPKLMIYEVSNRPSGVSNRFSGSKSGNTASLTISGLQAEDEADYYCSSYTSSSTVVFGGGTKLTVLGQPKAAPSVTLFPPSSEELQANKATLVCLISDFYPGAVTVAWKADSSPVKAGVETTTPSKQSNNKYAASSYLSLTPEQWKSHRSYSCQVTHEGSTVEKTVAPTECS

SEQ ID NO: 5912 - protein, 235 aa, synthetic construct
MGWSCIILFLVATATGVHSQSALTQPASVSGSPGQSITISCTGTSSDVGGYNYVSWYQQHPGKAPKLMIYDVSKRPSGVSNRFSGSKSGNTASLTISGLQAEDEADYYCCSYAGSSNVVFGGGTQLTVLGQPKAAPSVTLFPPSSEELQANKATLVCLISDFYPGAVTVAWKADSSPVKAGVETTTPSKQSNNKYAASSYLSLTPEQWKSHRSYSCQVTHEGSTVEKTVAPTECS

SEQ ID NO: 5913 - protein, 236 aa, synthetic construct; identical to SEQ ID NO: 5861

SEQ ID NO: 5914 - protein, 236 aa, synthetic construct; identical to SEQ ID NO: 5875

SEQ ID NO: 5915 - protein, 227 aa, synthetic construct
MGWSCIILFLVATATGVHSSYELTQPPSVSVSPGQTASITCSGDKLGDKYACWYQQKPGQSPVLVIYQDSKRPSGIPERFSGSNSGNTATLTISGTQAMDEADYYCQATEVFGGGTKLTVLGQPKAAPSVTLFPPSSEELQANKATLVCLISDFYPGAVTVAWKADSSPVKAGVETTTPSKQSNNKYAASSYLSLTPEQWKSHRSYSCQVTHEGSTVEKTVAPTECS

SEQ ID NO: 5916 - protein, 230 aa, synthetic construct
MGWSCIILFLVATATGVHSSYELTQPSSVSVSPGQTAKITCSGDVLAKKYARWFQQKPGQVPVLVIYKDSERPSGIPERFSGSSSGATVTLTISGAQVEDEADYYCYSAADNKVFGGGTKLTVLGQPKAAPSVTLFPPSSEELQANKATLVCLISDFYPGAVTVAWKADSSPVKAGVETTTPSKQSNNKYAASSYLSLTPEQWKSHRSYSCQVTHEGSTVEKTVAPTECS

SEQ ID NO: 5917 - protein, 231 aa, synthetic construct
MGWSCIILFLVATATGVHSSYELTQPPSVSVSPGQTASITCSGDKLGDKYACWYQQKPGQSPVVVIYQDSKRPSGIPERFSGSNSGNTATLTISGTQAMDEADYYCQAWDSSTAVFGGGTKLTVLGQPKAAPSVTLFPPSSEELQANKATLVCLISDFYPGAVTVAWKADSSPVKAGVETTTPSKQSNNKYAASSYLSLTPEQWKSHRSYSCQVTHEGSTVEKTVAPTECS

SEQ ID NO: 5918 - protein, 231 aa, synthetic construct; identical to SEQ ID NO: 5840

SEQ ID NO: 5919 - protein, 232 aa, synthetic construct
MGWSCIILFLVATATGVHSSYELTQPPSVSVSPGQTARITCSGDALPKKYAYWYQQKSGQAPVLVIYEDSKRPSGIPERFSGSSSGTMATLTISGAQVEDEADYYCYSTDSSGNRVFGGGTKLTVLGQPKAAPSVTLFPPSSEELQANKATLVCLISDFYPGAVTVAWKADSSPVKAGVETTTPSKQSNNKYAASSYLSLTPEQWKSHRSYSCQVTHEGSTVEKTVAPTECS

SEQ ID NO: 5920 - protein, 233 aa, synthetic construct
MGWSCIILFLVATATGVHSSYELTQPPSVSVSPGQTARITCSGDALPKKYAYWYQQKSGQAPVLVIYEDSKRPSGIPERFSGSSSGTMATLTISGAQVEDEADYYCYSTDSSGNHRGFGGGTKLTVLGQPKAAPSVTLFPPSSEELQANKATLVCLISDFYPGAVTVAWKADSSPVKAGVETTTPSKQSNNKYAASSYLSLTPEQWKSHRSYSCQVTHEGSTVEKTVAPTECS

SEQ ID NO: 5921 - protein, 233 aa, synthetic construct
MGWSCIILFLVATATGVHSQSALTQPRSVSGSPGQSVTISCTGTSSDVGGYNYVSWYQQHPGKAPKLMIYDVSKRPSGVPDRFSGSKSGNTASLTISGLQAEDEADYYCCSYAQGVVFGGGTKLTVLGQPKAAPSVTLFPPSSEELQANKATLVCLISDFYPGAVTVAWKADSSPVKAGVETTTPSKQSNNKYAASSYLSLTPEQWKSHRSYSCQVTHEGSTVEKTVAPTECS

SEQ ID NO: 5922 - protein, 233 aa, synthetic construct
MGWSCIILFLVATATGVHSSSELTQDPAVSVALGQTVRITCQGDSLRSYYASWYQQKPGQAPVLLIYGKNNRPSGIPDRFSGSSSGNTASLTITGAQAEDEADYYCNSRDSSGNHWVFGGGTKLTVLGQPKAAPSVTLFPPSSEELQANKATLVCLISDFYPGAVTVAWKADSSPVKAGVETTTPSKQSNNKYAASSYLSLTPEQWKSHRSYSCQVTHEGSTVEKTVAPTECS

SEQ ID NO: 5923 - protein, 233 aa, synthetic construct
MGWSCIILFLVATATGVHSSSELTQDPAVSVALGQTVRITCQGDSLRSYYASWYQQKPGQAPVLVIYGKNNRPSGIPDRFSGSSSGNTASLTITGAQAEDEADYYCNSRDSSGNHLVFGTGTKVTVLGQPKAAPSVTLFPPSSEELQANKATLVCLISDFYPGAVTVAWKADSSPVKAGVETTTPSKQSNNKYAASSYLSLTPEQWKSHRSYSCQVTHEGSTVEKTVAPTECS

SEQ ID NO: 5924 - protein, 233 aa, synthetic construct; identical to SEQ ID NO: 5822

SEQ ID NO: 5925 - protein, 233 aa, synthetic construct
MGWSCIILFLVATATGVHSSYVLTQPPSVSVAPGKTARITCGGNNIGSKSVHWYQQKPGQAPVLVIYYDSDRPSGIPERFSGSNSGNTATLTISRVEAGDEADYYCQVWDSSSDHWVFGGGTKLTVLGQPKAAPSVTLFPPSSEELQANKATLVCLISDFYPGAVTVAWKADSSPVKAGVETTTPSKQSNNKYAASSYLSLTPEQWKSHRSYSCQVTHEGSTVEKTVAPTECS

SEQ ID NO: 5926 - protein, 233 aa, synthetic construct; identical to SEQ ID NO: 5855

SEQ ID NO: 5927 - protein, 233 aa, synthetic construct; identical to SEQ ID NO: 5855

SEQ ID NO: 5928 - protein, 233 aa, synthetic construct
MGWSCIILFLVATATGVHSSSELTQDPAVSVALGQTVRITCQGDSLRSYYASWYQQKPGQAPVLVIYGKNNRPSGIPDRFSGSNSGNTASLTITGAQAEDEADYYCNSRDSSGNHLLFGGGTKLTVLGQPKAAPSVTLFPPSSEELQANKATLVCLISDFYPGAVTVAWKADSSPVKAGVETTTPSKQSNNKYAASSYLSLTPEQWKSHRSYSCQVTHEGSTVEKTVAPTECS

SEQ ID NO: 5929 - protein, 233 aa, synthetic construct
MGWSCIILFLVATATGVHSSSELTQDPGVSVALGQTVRITCQGDSLRSYYASWYQQKPGQAPVLVMYGKKNRPSGIPDRFSGSSSGNTASLTITGAQAEDEADYYCKSRDSSGNHVVFGGGTKLTVLGQPKAAPSVTLFPPSSEELQANKATLVCLISDFYPGAVTVAWKADSSPVKAGVETTTPSKQSNNKYAASSYLSLTPEQWKSHRSYSCQVTHEGSTVEKTVAPTECS

SEQ ID NO: 5930 - protein, 233 aa, synthetic construct; identical to SEQ ID NO: 5838

SEQ ID NO: 5931 - protein, 233 aa, synthetic construct
MGWSCIILFLVATATGVHSSSELTQDPAVSVALGQTVRITCQGDSFRNYYASWYQQMPGQAPVLVIYGKNNRPSGIPDRFSGSSSGNTASLTITGAQAEDEADYYCNSRDSSGNHWVFGGGTKLTVLGQPKAAPSVTLFPPSSEELQANKATLVCLISDFYPGAVTVAWKADSSPVKAGVETTTPSKQSNNKYAASSYLSLTPEQWKSHRSYSCQVTHEGSTVEKTVAPTECS

SEQ ID NO: 5932 - protein, 233 aa, synthetic construct; identical to SEQ ID NO: 5855

SEQ ID NO: 5933 - protein, 233 aa, synthetic construct; identical to SEQ ID NO: 5855

SEQ ID NO: 5934 - protein, 234 aa, synthetic construct; identical to SEQ ID NO: 5858

SEQ ID NO: 5935 - protein, 235 aa, synthetic construct
MGWSCIILFLVATATGVHSQSALTQPASVSGSPGQSITISCTGTSSDVGVYNFVSWYQQHPGKAPKLMIYDVTKRPSGASERFSGSKSGSTASLTISGLQAEDEADYYCCSYAGSSTWVFGGGTKLTVLGQPKAAPSVTLFPPSSEELQANKATLVCLISDFYPGAVTVAWKADSSPVKAGVETTTPSKQSNNKYAASSYLSLTPEQWKSHRSYSCQVTHEGSTVEKTVAPTECS

SEQ ID NO: 5936 - protein, 236 aa, synthetic construct
MGWSCIILFLVATATGVHSQSVLTQPPSVSGAPGQRVTISCTGSSSNIGAGYDVHWYQQLPGTAPKILIYVNNNRPSGVPDRFSGSKSGTSASLAITGLQAEDEADYYCQSYDSSLSGPVFGGGTKLTVLGQPKAAPSVTLFPPSSEELQANKATLVCLISDFYPGAVTVAWKADSSPVKAGVETTTPSKQSNNKYAASSYLSLTPEQWKSHRSYSCQVTHEGSTVEKTVAPTECS

SEQ ID NO: 5937 - protein, 236 aa, synthetic construct
MGWSCIILFLVATATGVHSQSALTQPASVSGSPGQSITISCTGTSSDVGGYNYVSWYQQHPGKAPKLMIYDVSKRPSGVSNRFSGSKSGNTASLTISGLQAEDETDYYCCSYAGSSTYWVFGGGTKLTVLGQPKAAPSVTLFPPSSEELQANKATLVCLISDFYPGAVTVAWKADSSPVKAGVETTTPSKQSNNKYAASSYLSLTPEQWKSHRSYSCQVTHEGSTVEKTVAPTECS

SEQ ID NO: 5938 - protein, 237 aa, synthetic construct
MGWSCIILFLVATATGVHSQSVLTQPPSVSGAPGQRVTISCTGSSSNIGAGYDVHWYQQLPGTAPKLLIYGNSNRPSGVPDRFSGSKSGTSASLAITGLQAEDEADYYCQSYDSSLSGSYVFGTGTKVTVLGQPKAAPSVTLFPPSSEELQANKATLVCLISDFYPGAVTVAWKADSSPVKAGVETTTPSKQSNNKYAASSYLSLTPEQWKSHRSYSCQVTHEGSTVEKTVAPTECS

SEQ ID NO: 5939 - protein, 240 aa, synthetic construct
MGWSCIILFLVATATGVHSQAVLTQPASLSASPGASASLTCTLRSGIHVDTSRIYWYQQKPGSPPQYLLRYKSDSDKHQDSGVPSRFSGSKDASTNAGILLISGLQSEDEADYYCMIWHSSAIVFGGGTKLTVLGQPKAAPSVTLFPPSSEELQANKATLVCLISDFYPGAVTVAWKADSSPVKAGVETTTPSKQSNNKYAASSYLSLTPEQWKSHRSYSCQVTHEGSTVEKTVAPTECS

SEQ ID NO: 5940 - protein, 240 aa, synthetic construct
MGWSCIILFLVATATGVHSQAVLTQPASLSASPGASASLTCTLRSGINVGSYRIYWFQQRPGSPPQYLLRYKSDSDKQQGSGVPSRFSGSKDASANAGILLISGLQSEDEADYYCMIWHSSASVFGGGTKVTVLGQPKAAPSVTLFPPSSEELQANKATLVCLISDFYPGAVTVAWKADSSPVKAGVETTTPSKQSNNKYAASSYLSLTPEQWKSHRSYSCQVTHEGSTVEKTVAPTECS

SEQ ID NO: 5941 - protein, 240 aa, synthetic construct; identical to SEQ ID NO: 5878

SEQ ID NO: 5942 - protein, 233 aa, synthetic construct; identical to SEQ ID NO: 5855

SEQ ID NO: 5943 - protein, 233 aa, synthetic construct; identical to SEQ ID NO: 5855

SEQ ID NO: 5944 - protein, 233 aa, synthetic construct
MGWSCIILFLVATATGVHSSSELTQDPTVSVALGQTVRITCQGDSLRSYYASWYQQKPGQAPVLVIYGKNNRPSGIPDRFSGSSSGNTASLTITGAQAEDEADYYCNSRDSSGNHWVFGGGTKLTVLGQPKAAPSVTLFPPSSEELQANKATLVCLISDFYPGAVTVAWKADSSPVKAGVETTTPSKQSNNKYAASSYLSLTPEQWKSHRSYSCQVTHEGSTVEKTVAPTECS

SEQ ID NO: 5945 - protein, 233 aa, synthetic construct; identical to SEQ ID NO: 5855

SEQ ID NO: 5946 - protein, 233 aa, synthetic construct
MGWSCIILFLVATATGVHSSSELTPDPAVSVALGQTVRITCQGDSLRSYYASWYQQKPGQAPILVIYHKNNRPSGIPDRFSGSSSGNTASLTITGAQAEDEADYYCNSRDSSGNHVVFGGGTKLTVLGQPKAAPSVTLFPPSSEELQANKATLVCLISDFYPGAVTVAWKADSSPVKAGVETTTPSKQSNNKYAASSYLSLTPEQWKSHRSYSCQVTHEGSTVEKTVAPTECS

SEQ ID NO: 5947 - protein, 233 aa, synthetic construct; identical to SEQ ID NO: 5855

SEQ ID NO: 5948 - protein, 233 aa, synthetic construct; identical to SEQ ID NO: 5838

SEQ ID NO: 5949 - protein, 235 aa, synthetic construct
MGWSCIILFLVATATGVHSQSALTQPPSASGSPGQSVTISCTGTSSDVGGYNYVSWYQQHPGKAPKLMIYEVSKRPSGVPDRFSGSKSGNTASLTVSGLQAEDEADYYCSSYAGSNNVVFGGGTKLTVLGQPKAAPSVTLFPPSSEELQANKATLVCLISDFYPGAVTVAWKADSSPVKAGVETTTPSKQSNNKYAASSYLSLTPEQWKSHRSYSCQVTHEGSTVEKTVAPTECS

SEQ ID NO: 5950 - protein, 235 aa, synthetic construct; identical to SEQ ID NO: 5810

SEQ ID NO: 5951 - protein, 235 aa, synthetic construct
MGWSCIILFLVATATGVHSQTVVTQEPSLTVSPGGTVTLTCASSTGAVTSGYYPNWFQQKPGQAPRALIYSTSNKHSWTPARFSGSLLGGKAALTLSGVQPEDEAEYYCLLYYGGAQLVFGGGTKLTVLGQPKAAPSVTLFPPSSEELQANKATLVCLISDFYPGAVTVAWKADSSPVKAGVETTTPSKQSNNKYAASSYLSLTPEQWKSHRSYSCQVTHEGSTVEKTVAPTECS

SEQ ID NO: 5952 - protein, 236 aa, synthetic construct
MGWSCIILFLVATATGVHSQSVLTQPPSVSGAPGQRVTISCTGSNSNIGAGYDIHWYQQLPVTAPKLLIYGNSNRPSGVPDRFSGSKSGSSASLAITGLQAEDEADYYCQSYDNSLSGSVFGGGTKLTVLGQPKAAPSVTLFPPSSEELQANKATLVCLISDFYPGAVTVAWKADSSPVKAGVETTTPSKQSNNKYAASSYLSLTPEQWKSHRSYSCQVTHEGSTVEKTVAPTECS

SEQ ID NO: 5953 - protein, 231 aa, synthetic construct
MGWSCIILFLVATATGVHSSYELTQPSSVSVSPGQTARITCSGDVLAKKFARWFQQKPGQAPLLVIYKDSERPSGIPERFSGSNSGTTVTLTISGAQVEDEADYYCYSAADNNLVFGGGTKLTVLGQPKAAPSVTLFPPSSEELQANKATLVCLISDFYPGAVTVAWKADSSPVKAGVETTTPSKQSNNKYAASSYLSLTPEQWKSHRSYSCQVTHEGSTVEKTVAPTECS

SEQ ID NO: 5954 - protein, 233 aa, synthetic construct; identical to SEQ ID NO: 5838

SEQ ID NO: 5955 - protein, 233 aa, synthetic construct
MGWSCIILFLVATATGVHSSYVLTQPPSVSVAPGTTARITCGGNNFGSKSVHWYQQKPGQAPVLVIYYDSDRPSGIPERFSGSNSGNTATLTISRVEAGDEADYYCQVWDSTSDHYVFGTGTKVTVLGQPKAAPSVTLFPPSSEELQANKATLVCLISDFYPGAVTVAWKADSSPVKAGVETTTPSKQSNNKYAASSYLSLTPEQWKSHRSYSCQVTHEGSTVEKTVAPTECS

SEQ ID NO: 5956 - protein, 235 aa, synthetic construct
MGWSCIILFLVATATGVHSQSALTQPASVSGSPGQSITISCTGTSSDVGAYNYVSWYQQHPGKAPKLMIYAVSKRPSGVSYRFSGSKSGNTASLTISGLQAEDEADYYCCSYAGTISWVFGGGTKLTVLGQPKAAPSVTLFPPSSEELQANKATLVCLISDFYPGAVTVAWKADSSPVKAGVETTTPSKQSNNKYAASSYLSLTPEQWKSHRSYSCQVTHEGSTVEKTVAPTECS

SEQ ID NO: 5957 - protein, 235 aa, synthetic construct; identical to SEQ ID NO: 5910

SEQ ID NO: 5958 - protein, 235 aa, synthetic construct
MGWSCIILFLVATATGVHSQSALTQPPSASGSPGQSVTISCTGTSSDVGGYNYVSWYQQHPGKAPKLMIYEVNKRPSGVPDRLSGSKSGNTASLTVSGLQAEDEADYYCSSYAGSNNWVFGGGTKLTVLGQPKAAPSVTLFPPSSEELQANKATLVCLISDFYPGAVTVAWKADSSPVKAGVETTTPSKQSNNKYAASSYLSLTPEQWKSHRSYSCQVTHEGSTVEKTVAPTECS

SEQ ID NO: 5959 - protein, 235 aa, synthetic construct; identical to SEQ ID NO: 5860

SEQ ID NO: 5960 - protein, 236 aa, synthetic construct
MGWSCIILFLVATATGVHSQSVLTQPPSVSGAPGQRVTISCTGSSSNIGAGYDVHWYQQLPGTAPKLLIYGNSNRPSGVPDRFSGSKSGTSASLAITGLQAEDEADYYCQSYDSSLSGWVFGGGTKLTVLGQPKAAPSVTLFPPSSEELQANKATLVCLISDFYPGAVTVAWKADSSPVKAGVETTTPSKQSNNKYAASSYLSLTPEQWKSHRSYSCQVTHEGSTVEKTVAPTECS

SEQ ID NO: 5961 - protein, 236 aa, synthetic construct
MGWSCIILFLVATATGVHSQSALTQPPSVSGSPGQSVTISCTGTSSDVGSYNRVSWYQQPPGTAPKLMIYDVSNRPSGVPDRFSGSKSGNTASLTISGLQAEDEADYYCSSYTSSSTYVVFGGGTKLTVLGQPKAAPSVTLFPPSSEELQANKATLVCLISDFYPGAVTVAWKADSSPVKAGVETTTPSKQSNNKYAASSYLSLTPEQWKSHRSYSCQVTHEGSTVEKTVAPTECS

SEQ ID NO: 5962 - protein, 237 aa, synthetic construct
MGWSCIILFLVATATGVHSQSVLTQPPSVSATPGQRVTISCTGSDSNIGAGYDVHWYQQLPGAVPRLLIHDNIIRPSGVPDRFSGSKSDTSASLAISGLHAEDEADYYCQSYDISLSGSVVFGGGTKLTVLGQPKAAPSVTLFPPSSEELQANKATLVCLISDFYPGAVTVAWKADSSPVKAGVETTTPSKQSNNKYAASSYLSLTPEQWKSHRSYSCQVTHEGSTVEKTVAPTECS

SEQ ID NO: 5963 - protein, 231 aa, synthetic construct
MGWSCIILFLVATATGVHSSYELTQPPSVSVSPGQTASITCSGDKLGDKYACWYQQKPGQSPVLVIYQDSKRPSGIPERFSGSNSGNTATLTISGTQAMDEADYYCQAWDSSTAVFGGGTKLTVLGQPKAAPSVTLFPPSSEELQANKATLVCLISDFYPGAVTVAWKADSSPVKAGVETTTPSKQSNNKYAASSYLSLTPEQWKSHRSYSCQVTHEGSTVEKTVAPTECS

SEQ ID NO: 5964 - protein, 231 aa, synthetic construct
MGWSCIILFLVATATGVHSSYELTQPPSVSVSPGQTARITCSGDGLSKKYAYWYQQKSGQAPVLVIYEDSKRPSGIPERFSGSSSGTMATLTVSGAQVEDEADYYCYSTDSSGKIFGGGTKLTVLGQPKAAPSVTLFPPSSEELQANKATLVCLISDFYPGAVTVAWKADSSPVKAGVETTTPSKQSNNKYAASSYLSLTPEQWKSHRSYSCQVTHEGSTVEKTVAPTECS

SEQ ID NO: 5965 - protein, 233 aa, synthetic construct; identical to SEQ ID NO: 5822

SEQ ID NO: 5966 - protein, 233 aa, synthetic construct; identical to SEQ ID NO: 5822

SEQ ID NO: 5967 - protein, 233 aa, synthetic construct; identical to SEQ ID NO: 5838

SEQ ID NO: 5968 - protein, 233 aa, synthetic construct; identical to SEQ ID NO: 5822

SEQ ID NO: 5969 - protein, 233 aa, synthetic construct; identical to SEQ ID NO: 5855

SEQ ID NO: 5970 - protein, 233 aa, synthetic construct; identical to SEQ ID NO: 5822

SEQ ID NO: 5971 - protein, 235 aa, synthetic construct; identical to SEQ ID NO: 5911

SEQ ID NO: 5972 - protein, 235 aa, synthetic construct; identical to SEQ ID NO: 5860

SEQ ID NO: 5973 - protein, 233 aa, synthetic construct
MGWSCIILFLVATATGVHSSSELTQDPAVSVALGQTVRITCQGDSLRSYYATWYQQKPGQAPVLVIYGRNNRPSGIPDRFSGSSSGNTASLTITGAQAEDEADYYCYSRDSSGNHLVFGGGTQLTVLGQPKAAPSVTLFPPSSEELQANKATLVCLISDFYPGAVTVAWKADSSPVKAGVETTTPSKQSNNKYAASSYLSLTPEQWKSHRSYSCQVTHEGSTVEKTVAPTECS

SEQ ID NO: 5974 - protein, 233 aa, synthetic construct
MGWSCIILFLVATATGVHSSYVLTQPPSVSVAPGKTARITCGGNNIGSKSVHWYQQKPGQAPVLVIYYDSDRPSGIPERFSGSNSGNTATLTISRVEAGDEADYYCQVWDSSSDHRVFGGGTKLTVLGQPKAAPSVTLFPPSSEELQANKATLVCLISDFYPGAVTVAWKADSSPVKAGVETTTPSKQSNNKYAASSYLSLTPEQWKSHRSYSCQVTHEGSTVEKTVAPTECS

SEQ ID NO: 5975 - protein, 233 aa, synthetic construct; identical to SEQ ID NO: 5855

SEQ ID NO: 5976 - protein, 233 aa, synthetic construct
MGWSCIILFLVATATGVHSSSELTQDPAVSVALGQTVRITCQGDSLRSYYASWYQQKPGQAPVLVFYGKNKRPSGIPDRFSGSSSGNTASLTITGAQAEDEADYYCNSRDSNGNHWVFGGGTKLTVLGQPKAAPSVTLFPPSSEELQANKATLVCLISDFYPGAVTVAWKADSSPVKAGVETTTPSKQSNNKYAASSYLSLTPEQWKSHRSYSCQVTHEGSTVEKTVAPTECS

SEQ ID NO: 5977 - protein, 234 aa, synthetic construct
MGWSCIILFLVATATGVHSQSALTQPASVSGSPGQSITISCTGTSSDVGGYNYVSWYQQHPGKAPKLMIYDVSKRPSGVSNRFSGSKSGNTASLTISGLQAEDEADYYCCSYAGSSWVFGGGTKLTVLGQPKAAPSVTLFPPSSEELQANKATLVCLISDFYPGAVTVAWKADSSPVKAGVETTTPSKQSNNKYAASSYLSLTPEQWKSHRSYSCQVTHEGSTVEKTVAPTECS

SEQ ID NO: 5978 - protein, 236 aa, synthetic construct
MGWSCIILFLVATATGVHSQSVLTQPPSVSGVPGQRVTISCTGSSSNIGARYDVHWYQQLPGTAPKLLIYGNSNRPSGVPDRFSGSKSGTSASLAITGLQAEDEADYYCQSYDGTLGGWIFGGGTQLTVLGQPKAAPSVTLFPPSSEELQANKATLVCLISDFYPGAVTVAWKADSSPVKAGVETTTPSKQSNNKYAASSYLSLTPEQWKSHRSYSCQVTHEGSTVEKTVAPTECS

SEQ ID NO: 5979 - protein, 233 aa, synthetic construct; identical to SEQ ID NO: 5822

SEQ ID NO: 5980 - protein, 234 aa, synthetic construct; identical to SEQ ID NO: 5977

SEQ ID NO: 5981 - protein, 231 aa, synthetic construct
MGWSCIILFLVATATGVHSSYELTQPPSVSVSPGQTASITCSGDKLGDKYACWYQQKPGQSPVLVIYQDSKRPSGIPERFSGSNSGNTATLTISGTQAMDEADYYCQAWDSSTVIFGGGTKLTVLGQPKAAPSVTLFPPSSEELQANKATLVCLISDFYPGAVTVAWKADSSPVKAGVETTTPSKQSNNKYAASSYLSLTPEQWKSHRSYSCQVTHEGSTVEKTVAPTECS

SEQ ID NO: 5982 - protein, 233 aa, synthetic construct
MGWSCIILFLVATATGVHSSYELTQPPSVSVSPGQTARITCSGDALPKKYAYWYQQKSGQAPVLVIYEDNKRPSGIPERFSGSSSGTMATLTISGAQVEDEADYYCYSTDSSGNHRVFGGGTKLTVLGQPKAAPSVTLFPPSSEELQANKATLVCLISDFYPGAVTVAWKADSSPVKAGVETTTPSKQSNNKYAASSYLSLTPEQWKSHRSYSCQVTHEGSTVEKTVAPTECS

SEQ ID NO: 5983 - protein, 233 aa, synthetic construct
MGWSCIILFLVATATGVHSSSELTQDPAVSVALGQTVRITCQGDSLRNYYASWYQQKPGQAPVIVIYGKNNRPSGIPDRFSGSSSGNTASLTITGAQAEDEADYYCNSRDSSGNHLVFGGGTKLTVLGQPKAAPSVTLFPPSSEELQANKATLVCLISDFYPGAVTVAWKADSSPVKAGVETTTPSKQSNNKYAASSYLSLTPEQWKSHRSYSCQVTHEGSTVEKTVAPTECS

SEQ ID NO: 5984 - protein, 233 aa, synthetic construct
MGWSCIILFLVATATGVHSQSALTQPPSASGSPGQSVTISCTGTSSDVGGYNYVSWYQQHPGKAPKLMIYEVSKRPSGVPDRFSGSKSGNTASLTVSGLQAEDEADYYCSSYAGSNNFGGGTKLTVLGQPKAAPSVTLFPPSSEELQANKATLVCLISDFYPGAVTVAWKADSSPVKAGVETTTPSKQSNNKYAASSYLSLTPEQWKSHRSYSCQVTHEGSTVEKTVAPTECS

SEQ ID NO: 5985 - protein, 233 aa, synthetic construct
MGWSCIILFLVATATGVHSSSELTQDPAVSVALGQTVRITCQGDSLRTYYASWYQQKPGQAPVLVIYGKNKRPSGIPDRFSGSSSGNTASLTITGAQAEDEADYYCNSRDSSGNHWVFGGGTKLTVLGQPKAAPSVTLFPPSSEELQANKATLVCLISDFYPGAVTVAWKADSSPVKAGVETTTPSKQSNNKYAASSYLSLTPEQWKSHRSYSCQVTHEGSTVEKTVAPTECS

SEQ ID NO: 5986 - protein, 233 aa, synthetic construct
MGWSCIILFLVATATGVHSSYVLTQPPSVSVAPGQTARIICGGDNIGIKNVHWYQQKPGQAPVLVIYDDSDRPSGIPERFSGSNSGNTATLTISRVEAGDEADYCCQVWDSSSDHVVFGGGTKLTVLGQPKAAPSVTLFPPSSEELQANKATLVCLISDFYPGAVTVAWKADSSPVKAGVETTTPSKQSNNKYAASSYLSLTPEQWKSHRSYSCQVTHEGSTVEKTVAPTECS

SEQ ID NO: 5987 - protein, 231 aa, synthetic construct
MGWSCIILFLVATATGVHSSYELTQPPSVSVSPGQTASITCSGDKLGDKYTCWYQQKPGQSPVLVIYQDIKRPSGIPDRFSGSNSGNTATLTISGTQAMDEADYYCQAWDSSTVVFGGGTKLTVLGQPKAAPSVTLFPPSSEELQANKATLVCLISDFYPGAVTVAWKADSSPVKAGVETTTPSKQSNNKYAASSYLSLTPEQWKSHRSYSCQVTHEGSTVEKTVAPTECS

SEQ ID NO: 5988 - protein, 233 aa, synthetic construct; identical to SEQ ID NO: 5813

SEQ ID NO: 5989 - protein, 235 aa, synthetic construct; identical to SEQ ID NO: 5872

SEQ ID NO: 5990 - protein, 235 aa, synthetic construct; identical to SEQ ID NO: 5818

SEQ ID NO: 5991 - protein, 234 aa, synthetic construct; identical to SEQ ID NO: 5908

SEQ ID NO: 5992 - protein, 128 aa, synthetic construct
QVQLQESGGGLVQPGGSLRLSCAASGKMSSRRCMAWFRQAPGKERERVAKLLTTSGSTYLADSVKGRFTISQNNAKSTVYLQMNSLKPEDTAMYYCAADSFEDPTCTLVTSSGAFQYWGQGTQVTVSS

SEQ ID NO: 5993 - DNA, 25 bp, synthetic construct
  source 1..25: mol_type = other DNA
  misc_feature 1..23: note = RNA
  misc_feature 24..25: note = DNA
cgttaatcgcgtataatacgcgtat

SEQ ID NO: 5994 - DNA, 25 bp, synthetic construct
  source 1..25: mol_type = other DNA
  misc_feature 1..23: note = RNA
  misc_feature 24..25: note = DNA
acgcgtattatacgcgattaacgat

SEQ ID NO: 5995 - DNA, 25 bp, synthetic construct
  source 1..25: mol_type = other DNA
  misc_feature 1..23: note = RNA
  misc_feature 24..25: note = DNA
cccagagagcgagtttgagggtctc

SEQ ID NO: 5996 - DNA, 25 bp, synthetic construct
  source 1..25: mol_type = other DNA
  misc_feature 1..23: note = RNA
  misc_feature 24..25: note = DNA
gaccctcaaactcgctctctgggtc